(19) United States
(12) Patent Application Publication
(10) Pub. No.: US 2020/0276285 A1
(43) Pub. Date: Sep. 3, 2020

(54) A METHOD TO CREATE PERSONALIZED CANCER VACCINES

(71) Applicant: ARIZONA BOARD OF REGENTS ON BEHALF OF ARIZONA STATE UNIVERSITY, Scottsdale, AZ (US)

(72) Inventors: Stephen Albert JOHNSTON, Tempe, AZ (US); Luhui SHEN, Tempe, AZ (US)

(21) Appl. No.: 16/617,805

(22) PCT Filed: Jun. 1, 2018
(86) PCT No.: PCT/US2018/035741

§ 371 Date: Nov. 27, 2019

Related U.S. Application Data
(60) Provisional application No. 62/514,689, filed on Jun. 2, 2017.
(60) Provisional application No. 62/514,679, filed on Jun. 2, 2017.

(51) Int. Cl. A61K 39/00; G01N 33/50; A61K 39/39; A61K 9/00; G01N 33/574; A61P 35/00

(52) U.S. Cl. CPC A61K 39/0011; G01N 33/505; A61K 39/39; A61K 9/0019; A61K 2039/53; A61P 35/00; A61K 2039/552; A61K 2039/545; G01N 33/574

(57) ABSTRACT

Provided herein, are methods of treating cancer using personalized cancer vaccines comprising peptides having frameshift mutations caused by errors in transcription and splicing of an mRNA.

### CROSS-REFERENCE

[0001] This application is a U.S. National Phase of International Application No. PCT/US2018/035741, filed on Jun. 1, 2018, which claims the benefit of U.S. Provisional Application No. 62/514,689, filed Jun. 2, 2017, and U.S. Provisional Application No. 62/514,679, filed Jun. 2, 2017, each of which are incorporated herein by reference in their entireties.

### SEQUENCE LISTING

[0002] The instant application contains a Sequence Listing which has been submitted electronically in ASCII format and is hereby incorporated by reference in its entirety. Said ASCII copy, created on Jul. 13, 2018, is named 42206-709_831_SL.txt and is 1,955,000 bytes in size.

### BACKGROUND

[0003] There is a resurgence of enthusiasm to use the immune system to treat cancer. This is most notable with respect to using checkpoint inhibitors (as antibodies) to release the existing immune response in the patient to their own tumor. Yet, only a small proportion of the patients treated have a positive response. The evidence to date is that whether a patient has an effective response to the treatment depends on the nature of the immune response they have established against the tumor. More specifically, the level and quality of the immune response to neopeptides in the cancer seems to be most important. This has led to the concept of personal cancer vaccines to bolster the response of the inhibitors and therefore, to increase the response rate.

### SUMMARY

[0004] Provided herein are methods of treating an individual in need of treatment for a cancer. Some such methods comprising, a) identifying peptides that are immunoreactive with a biological sample from the individual in a first population of peptides; b) preparing a vaccine composition comprising a second population of peptides comprising one or more peptides identified in step a) or a nucleic acid sequence encoding the second population of peptides; and c) administering an effective amount of the vaccine composition to the individual, thereby treating the cancer. In some cases, the method comprises obtaining the biological sample from the individual. Often, treating the cancer comprises reducing tumor size, inhibiting tumor growth, reducing tumor burden, increasing survival, or increasing cancer-free survival. In some cases, administering the vaccine composition elicits an immune response in the individual against the cancer. Sometimes, the second population of peptides is a subpopulation of the first population. Often, the identified peptide elicits a positive response in an antibody assay or a T cell assay performed on the biological sample from the individual. In some cases, the biological sample is selected from the group consisting of blood, plasma, serum, thymus, bone marrow, spleen, lymph node, bronchoalveolar lavage, breast, central nervous system, cerebrospinal fluid, eye, tears, gastrointestinal tract, saliva, feces, urine, heart, kidney, liver, lung, muscle, pancreas, peripheral nervous system, saliva, skin, thyroid, trachea, and tumor. Often, the biological sample comprises cells selected from B cells, T cells, CD4+ T cells, CD8+ T cells, Th17 cells, and combinations thereof. Alternatively and in combination, the biological sample comprises an antibody. Often, identifying comprises determining immunoreactivity of the first population of peptides to the biological sample using antibody reactivity. In some cases, antibody reactivity is detected using an antibody assay selected from the group consisting of ELISA, radio-immuno assay, western blot, surface plasmon resonance, immunostaining, immunoprecipitation, mass spectrometry, phage display, ELISPOT, flow cytometry, cytometric bead array, immunohistochemistry, high density array, microarray, delayed-type hypersensitivity (DTH), and combinations thereof. Alternately, or in combination, identifying comprises determining immunoreactivity of the first population of peptides to the biological sample using a T cell response. Often, the T cell response is detected using an assay selected from the group consisting of proliferation assay, 3H-thymidine assay, BrdU assay, CFSE assay, cytokine secretion assay, ELISA assay, ELISPOT assay, intracellular staining assay, quantitative rtPCR assay, cytometric bead array assay, cytotoxicity assay, 51-chromium assay, degranulation assay, granulysin assay, granzyme A assay, granzyme B assay, and perform assay. In some cases, the first population of peptides comprises peptides encoded by a frameshifted mRNA expressed by a cancer cell. Sometimes, a frameshifted mRNA is created in a splicing error or a transcription insertion or deletion error. Often, the first population of peptides comprises peptides having a sequence selected from SEQ ID NO: 1-7264. In some cases, each of the first population of peptides binds to at least one MHC subtype. Sometimes, each of the first population of peptides comprises at least one T cell epitope. In some cases, each of the first population of peptides comprises at least on B cell epitope. Often, the first population of peptides is bound to a substrate. In some cases, the first population of peptides is part of an array or a phage display library. Often, the vaccine composition comprises a pharmaceutically acceptable adjuvant or excipient. Often, the adjuvant is selected from the group consisting of ABM2, AS01B, AS02, AS02A, Adjumer, Adjuvax, Algammulin, Alum, Aluminum phosphate, Aluminum potassium sulfate, Bordetella pertussis, Calcitriol, Chitosan, Cholera toxin, CpG, Dibutyl phthalate, Dimethyldioctadecylammonium bromide (DDA), Freund's adjuvant, Freund's complete, Freund's incomplete (IFA), GM-CSF, GMDP, Gamma Inulin, Glycerol, HBSS (Hank's Balanced Salt Solution), IL-12, IL-2, Imiquimod, Interferon-Gamma, ISCOM, Lipid Core Peptide (LCP), Lipofectin, Lipopolysaccharide (LPS), Liposomes, MF59, MLP+TDM, Monophosphoryl lipid A, Montanide IMS-1313, Montanide ISA 206, Montanide ISA 720, Montanide ISA-51, Montanide ISA-50, nor-MDP, Oil-in-water emulsion, P1005 (non-ionic copolymer), Pam3Cys (lipoprotein), Pertussis toxin, Poloxamer, QS21, RaLPS, Ribi, Saponin, Seppic ISA 720, Soybean Oil, Squalene, Syntex Adjuvant Formulation (SAF), Synthetic polynucleotides (poly IC/poly AU), TiterMax Tomatine, Vaxfectin, XtendIII, and Zymosan. In some cases, the vaccine composition comprises an immune checkpoint inhibitor. Often, the immune checkpoint inhibitor is selected from one or more of the group consisting of a PD-1 inhibitor, a PD-L1 inhibitor, and a CTLA-4 inhibitor. Often, the immune checkpoint inhibitor is selected from one or more of the group consisting of Pembrolizumab, Nivolumab, and Atezolizumab. Sometimes, the vaccine is administered via a route selected from the group consisting of subcutaneous, intradermal, intramuscular, intranasal, intravenous, and sublingual. In some cases, the individual is a mammal. In some cases, the individual is a human, a cat, a mouse, a rat, a rabbit, a horse, a cow, or a pig. Often, the cancer is selected from the group consisting of Acute lymphoblastic leukemia, Acute monocytic leukemia, Acute myeloid leukemia, Acute promyelocytic leukemia, Adenocarcinoma, Adult T-cell leukemia, Astrocytoma, Bladder cancer, Bone Cancer, Brain Tumor, Breast Cancer, Burkitt's lymphoma, Carcinoma, Cervical Cancer, Chronic Lymphocytic Leukemia, Chronic myelogenous leukemia, Colon Cancer, Colorectal cancer, Endometrial cancer, Glioblastoma multiforme, Glioma, Hepatocellular carcinoma, Hodgkin's lymphoma, Inflammatory breast cancer, Kidney Cancer, Leukemia, Lung cancer, Lymphoma, Malignant Mesothelioma, Medulloblastoma, Melanoma, Multiple myeloma, Neuroblastoma, Non-Hodgkin Lymphoma, Non-Small Cell Lung Cancer, Ovarian Cancer, Pancreatic Cancer, Pituitary tumor, Prostate cancer, Retinoblastoma, Skin Cancer, Small Cell Lung Cancer, Squamous cell carcinoma, Stomach cancer, T-cell leukemia, T-cell lymphoma, Thyroid cancer, and Wilms' tumor.

[0005] Also provided herein are methods of eliciting an immune response in an individual having cancer. Some such methods comprising, a) identifying peptides that are immunoreactive with a biological sample in a first population of peptides; b) preparing a vaccine composition comprising a second population of peptides comprising one or more peptides identified in step a) or a nucleic acid sequence encoding the second population of peptides; and c) administering the vaccine composition to the individual, wherein administering the vaccine composition elicits an immune response in the individual against the cancer. In some cases, the method comprises obtaining the biological sample from the individual. Often, the method comprises treating the cancer. In some cases, treating the cancer comprises reducing tumor size, inhibiting tumor growth, reducing tumor burden, increasing survival, or increasing cancer-free survival. Often, the second population of peptides is a subpopulation of the first population. In some cases, the identified peptide elicits a positive response in an antibody assay or a T cell assay performed on the biological sample from the individual. In some cases, the immune response is a T cell response. Alternately, or in combination, the immune response is an antibody response. Often, the immune response is directed to a cancer. In some cases, the cancer is selected from the group consisting of Acute lymphoblastic leukemia, Acute monocytic leukemia, Acute myeloid leukemia, Acute promyelocytic leukemia, Adenocarcinoma, Adult T-cell leukemia, Astrocytoma, Bladder cancer, Bone Cancer, Brain Tumor, Breast Cancer, Burkitt's lymphoma, Carcinoma, Cervical Cancer, Chronic Lymphocytic Leukemia, Chronic myelogenous leukemia, Colon Cancer, Colorectal cancer, Endometrial cancer, Glioblastoma multiforme, Glioma, Hepatocellular carcinoma, Hodgkin's lymphoma, Inflammatory breast cancer, Kidney Cancer, Leukemia, Lung cancer, Lymphoma, Malignant Mesothelioma, Medulloblastoma, Melanoma, Multiple myeloma, Neuroblastoma, Non-Hodgkin Lymphoma, Non-Small Cell Lung Cancer, Ovarian Cancer, Pancreatic Cancer, Pituitary tumor, Prostate cancer, Retinoblastoma, Skin Cancer, Small Cell Lung Cancer, Squamous cell carcinoma, Stomach cancer, T-cell leukemia, T-cell lymphoma, Thyroid cancer, and Wilms' tumor. Often, the biological sample is selected from the group consisting of blood, plasma, serum, thymus, bone marrow, spleen, lymph node, bronchoalveolar lavage, breast, central nervous system, cerebrospinal fluid, eye, tears, gastrointestinal tract, saliva, feces, urine, heart, kidney, liver, lung, muscle, pancreas, peripheral nervous system, saliva, skin, thyroid, trachea, and tumor. In some cases, the biological sample comprises cells selected from B cells, T cells, CD4+ T cells, CD8+ T cells, Th17 cells, and combinations thereof. Alternately, or in combination, the biological sample comprises an antibody. Often, identifying comprises determining immunoreactivity of the first population of peptides to the biological sample using antibody reactivity. In some cases, antibody reactivity is detected using an antibody assay selected from the group consisting of ELISA, radio-immuno assay, western blot, surface plasmon resonance, immunostaining, immunoprecipitation, mass spectrometry, phage display, flow cytometry, cytometric bead array, immunohistochemistry, high density array, microarray and combinations thereof. In some cases, identifying comprises determining immunoreactivity of the first population of peptides to the biological sample using a T cell response. In some cases, the T cell response is detected using an assay selected from the group consisting of proliferation assay, 3H-thymidine assay, BrdU assay, CFSE assay, cytokine secretion assay, ELISPOT assay, intracellular staining assay, quantitative rtPCR assay, cytometric bead array assay, cytotoxicity assay, 51-chromium assay, degranulation assay, granulysin assay, granzyme A assay, granzyme B assay, and perform assay. Often, the first population of peptides comprises peptides encoded by a frameshifted mRNA expressed by a cancer cell. In some cases, a frameshifted mRNA is created in a splicing error or a transcription insertion or deletion error in a microsatellite. Often, the first population of peptides comprises peptides having a sequence selected from SEQ ID NO: in 1-7264. In some cases, each of the first population of peptides binds to at least one MHC subtype. Often, each of the first population of peptides comprises at least one T cell epitope. In some cases, each of the first population of peptides comprises at least on B cell epitope. Often, the first population of peptides is bound to a substrate. In some cases, the first population of peptides is part of an array or a phage display library. Often, the vaccine composition comprises a pharmaceutically acceptable adjuvant or excipient. Sometimes, the adjuvant is selected from the group consisting of ABM2, AS01B, AS02, AS02A, Adjumer, Adjuvax, Algammulin, Alum, Aluminum phosphate, Aluminum potassium sulfate, Bordetella pertussis, Calcitriol, Chitosan, Cholera toxin, CpG, Dibutyl phthalate, Dimethyldioctadecylammonium bromide (DDA), Freund's adjuvant, Freund's complete, Freund's incomplete (IFA), GM-CSF, GMDP, Gamma Inulin, Glycerol, HBSS (Hank's Balanced Salt Solution), IL-12, IL-2, Imiquimod, Interferon-Gamma, ISCOM, Lipid Core Peptide (LCP), Lipofectin, Lipopolysaccharide (LPS), Liposomes, MF59, MLP+TDM, Monophosphoryl lipid A, Montanide IMS-1313, Montanide ISA 206, Montanide ISA 720, Montanide ISA-51, Montanide ISA-50, nor-MDP, Oil-in-water emulsion, P1005 (non-ionic copolymer), Pam3Cys (lipoprotein), Pertussis toxin, Poloxamer, QS21, RaLPS, Ribi, Saponin, Seppic ISA 720, Soybean Oil, Squalene, Syntex Adjuvant Formulation (SAF), Synthetic polynucleotides (poly IC/poly AU), TiterMax Tomatine, Vaxfectin, XtendIII, and Zymosan. Often, the vaccine composition comprises an immune checkpoint inhibitor. In some cases, the immune checkpoint inhibitor is selected from one or more of the group consisting of a PD-1 inhibitor, a PD-L1 inhibitor, and a CTLA-4 inhibitor. In some cases, the immune checkpoint inhibitor is selected from one or more of the group consisting of Pembrolizumab, Nivolumab, and Atezolizumab. Often, the vaccine is administered via a route selected from the group consisting of subcutaneous, intradermal, intramuscular, intranasal, intravenous, orally, intradermal and sublingual. In some cases, the individual is a mammal. Often, the individual is a human, a cat, a mouse, a rat, a rabbit, a horse, a cow, or a pig.

[0006] Also provided herein are methods of reducing risk of developing cancer in an individual. Some such methods comprising, a) identifying peptides that are immunoreactive with a biological sample in a first population of peptides; b) preparing a vaccine composition comprising a second population of peptides comprising one or more peptides identified in step a) or a nucleic acid sequence encoding the second population of peptides; and c) administering the vaccine composition to the individual, wherein administering the vaccine composition elicits an immune response in the individual against the cancer and wherein the risk of developing cancer in the individual is reduced compared to an individual who did not receive the vaccine. In some cases, the method comprises obtaining the biological sample from the individual. Often, administering the vaccine composition elicits an immune response in the individual against the cancer. In some cases, the second population of peptides is a subpopulation of the first population. Often, the identified peptide elicits a positive response in an antibody assay or a T cell assay performed on the biological sample from the individual. Sometimes, the biological sample is selected from the group consisting of blood, plasma, serum, thymus, bone marrow, spleen, lymph node, bronchoalveolar lavage, breast, central nervous system, cerebrospinal fluid, eye, tears, gastrointestinal tract, saliva, feces, urine, heart, kidney, liver, lung, muscle, pancreas, peripheral nervous system, saliva, skin, thyroid, trachea, and tumor. Often, the biological sample comprises cells selected from B cells, T cells, CD4+ T cells, CD8+ T cells, Th17 cells, and combinations thereof. In some cases, the biological sample comprises an antibody. Often, identifying comprises determining immunoreactivity of the first population of peptides to the biological sample using antibody reactivity. In some cases, antibody reactivity is detected using an antibody assay selected from the group consisting of ELISA, radio-immuno assay, western blot, surface plasmon resonance, immunostaining, immunoprecipitation, mass spectrometry, phage display, ELISPOT, flow cytometry, cytometric bead array, immunohistochemistry, high density array, microarray, delayed-type hypersensitivity (DTH), and combinations thereof. Often, identifying comprises determining immunoreactivity of the first population of peptides to the biological sample using a T cell response. In some cases, the T cell response detected using an assay selected from the group consisting of proliferation assay, 3H-thymidine assay, BrdU assay, CFSE assay, cytokine secretion assay, ELISA assay, ELISPOT assay, intracellular staining assay, quantitative rtPCR assay, cytometric bead array assay, cytotoxicity assay, 51-chromium assay, degranulation assay, granulysin assay, granzyme A assay, granzyme B assay, and perform assay. In some cases, the first population of peptides comprises peptides encoded by a frameshifted mRNA expressed by a cancer cell. Often, a frameshifted mRNA is created in a splicing error or aby a transcription insertion or deletion error in a microsatellite. In some cases, the first population of peptides comprises peptides having a sequence selected from SEQ ID NO: 1-7264. Often, each of the first population of peptides binds to at least one MHC subtype. In some cases, each of the first population of peptides comprises at least one T cell epitope. Alternately, or in combination, each of the first population of peptides comprises at least on B cell epitope. In some cases, the first population of peptides is bound to a substrate. Often, the first population of peptides is part of an array or a phage display library. Often, the vaccine composition comprises a pharmaceutically acceptable adjuvant or excipient. In some cases, the adjuvant is selected from the group consisting of ABM2, AS01B, AS02, AS02A, Adjumer, Adjuvax, Algammulin, Alum, Aluminum phosphate, Aluminum potassium sulfate, Bordetella pertussis, Calcitriol, Chitosan, Cholera toxin, CpG, Dibutyl phthalate, Dimethyldioctadecylammonium bromide (DDA), Freund's adjuvant, Freund's complete, Freund's incomplete (IFA), GM-CSF, GMDP, Gamma Inulin, Glycerol, HBSS (Hank's Balanced Salt Solution), IL-12, IL-2, Imiquimod, Interferon-Gamma, ISCOM, Lipid Core Peptide (LCP), Lipofectin, Lipopolysaccharide (LPS), Liposomes, MF59, MLP+TDM, Monophosphoryl lipid A, Montanide IMS-1313, Montanide ISA 206, Montanide ISA 720, Montanide ISA-51, Montanide ISA-50, nor-MDP, Oil-in-water emulsion, P1005 (non-ionic copolymer), Pam3Cys (lipoprotein), Pertussis toxin, Poloxamer, QS21, RaLPS, Ribi, Saponin, Seppic ISA 720, Soybean Oil, Squalene, Syntex Adjuvant Formulation (SAF), Synthetic polynucleotides (poly IC/poly AU), TiterMax Tomatine, Vaxfectin, XtendIII, and Zymosan. Often, the vaccine composition comprises an immune checkpoint inhibitor. In some cases, the immune checkpoint inhibitor is selected from one or more of the group consisting of a PD-1 inhibitor, a PD-L1 inhibitor, and a CTLA-4 inhibitor. Often, the immune checkpoint inhibitor is selected from one or more of the group consisting of Pembrolizumab, Nivolumab, and Atezolizumab. In some cases, the vaccine is administered via a route selected from the group consisting of subcutaneous, intradermal, intramuscular, intranasal, intravenous, and sublingual. Often, the individual is a mammal. In some cases, the individual is a human, a cat, a mouse, a rat, a rabbit, a horse, a cow, or a pig. In some cases, the cancer is selected from the group consisting of Acute lymphoblastic leukemia, Acute monocytic leukemia, Acute myeloid leukemia, Acute promyelocytic leukemia, Adenocarcinoma, Adult T-cell leukemia, Astrocytoma, Bladder cancer, Bone Cancer, Brain Tumor, Breast Cancer, Burkitt's lymphoma, Carcinoma, Cervical Cancer, Chronic Lymphocytic Leukemia, Chronic myelogenous leukemia, Colon Cancer, Colorectal cancer, Endometrial cancer, Glioblastoma multiforme, Glioma, Hepatocellular carcinoma, Hodgkin's lymphoma, Inflammatory breast cancer, Kidney Cancer, Leukemia, Lung cancer, Lymphoma, Malignant Mesothelioma, Medulloblastoma, Melanoma, Multiple myeloma, Neuroblastoma, Non-Hodgkin Lymphoma, Non-Small Cell Lung Cancer, Ovarian Cancer, Pancreatic Cancer, Pituitary tumor, Prostate cancer, Retinoblastoma, Skin Cancer, Small Cell Lung Cancer, Squamous cell carcinoma, Stomach cancer, T-cell leukemia, T-cell lymphoma, Thyroid cancer, and Wilms' tumor.

[0007] Also provided herein are methods of designing a personalized vaccine for an individual. Some such methods comprise a) identifying peptides that are immunoreactive with a biological sample in a first population of peptides; b) preparing a vaccine composition comprising a second population of peptides comprising one or more peptides identified in step a) or a nucleic acid sequence encoding the second population of peptides. In some cases, the method comprises obtaining the biological sample from the individual. Often, administration of an effective amount of the vaccine treats the cancer in the individual. In some cases, the cancer comprises reducing tumor size, inhibiting tumor growth, reducing tumor burden, increasing survival, or increasing cancer-free survival. Often, administering the vaccine composition elicits an immune response in the individual against the cancer. Sometimes, the second population of peptides is a subpopulation of the first population. Often, the identified peptide elicits a positive response in an antibody assay or a T cell assay performed on the biological sample from the individual. In some cases, the biological sample is selected from the group consisting of blood, plasma, serum, thymus, bone marrow, spleen, lymph node, bronchoalveolar lavage, breast, central nervous system, cerebrospinal fluid, eye, tears, gastrointestinal tract, saliva, feces, urine, heart, kidney, liver, lung, muscle, pancreas, peripheral nervous system, saliva, skin, thyroid, trachea, and tumor. Often, the biological sample comprises cells selected from B cells, T cells, CD4+ T cells, CD8+ T cells, Th17 cells, and combinations thereof. Alternately or in combination, the biological sample comprises an antibody. Often, identifying comprises determining immunoreactivity of the first population of peptides to the biological sample using antibody reactivity. In some cases, antibody reactivity is detected using an antibody assay selected from the group consisting of ELISA, radio-immuno assay, western blot, surface plasmon resonance, immunostaining, immunoprecipitation, mass spectrometry, phage display, flow cytometry, cytometric bead array, immunohistochemistry, high density array, microarray, and combinations thereof. Often, identifying comprises determining immunoreactivity of the first population of peptides to the biological sample using a T cell response. In some cases, the T cell response is detected using an assay selected from the group consisting of proliferation assay, 3H-thymidine assay, BrdU assay, CFSE assay, cytokine secretion assay, ELISPOT assay, intracellular staining assay, quantitative rtPCR assay, cytometric bead array assay, cytotoxicity assay, 51-chromium assay, degranulation assay, granulysin assay, granzyme A assay, granzyme B assay, and perform assay. In some cases, the first population of peptides comprises peptides encoded by a frameshifted mRNA expressed by a cancer cell. Often, a frameshifted mRNA is created by a transcription insertion or deletion error in a coding region microsatellite. In some cases, the first population of peptides comprises peptides having a sequence selected from SEQ ID NO: 1-7264. In some cases, each of the first population of peptides binds to at least one MHC subtype. Often, each of the first population of peptides comprises at least one T cell epitope. In some cases, each of the first population of peptides comprises at least on B cell epitope. In some cases, the first population of peptides is bound to a substrate. Often, the first population of peptides is part of an array or a phage display library. In some cases, the vaccine composition comprises a pharmaceutically acceptable adjuvant or excipient. Often, the adjuvant is selected from the group consisting of ABM2, AS01B, AS02, AS02A, Adjumer, Adjuvax, Algammulin, Alum, Aluminum phosphate, Aluminum potassium sulfate, Bordetella pertussis, Calcitriol, Chitosan, Cholera toxin, CpG, Dibutyl phthalate, Dimethyldioctadecylammonium bromide (DDA), Freund's adjuvant, Freund's complete, Freund's incomplete (IFA), GM-CSF, GMDP, Gamma Inulin, Glycerol, HBSS (Hank's Balanced Salt Solution), IL-12, IL-2, Imiquimod, Interferon-Gamma, ISCOM, Lipid Core Peptide (LCP), Lipofectin, Lipopolysaccharide (LPS), Liposomes, MF59, MLP+TDM, Monophosphoryl lipid A, Montanide IMS-1313, Montanide ISA 206, Montanide ISA 720, Montanide ISA-51, Montanide ISA-50, nor-MDP, Oil-in-water emulsion, P1005 (non-ionic copolymer), Pam3Cys (lipoprotein), Pertussis toxin, Poloxamer, QS21, RaLPS, Ribi, Saponin, Seppic ISA 720, Soybean Oil, Squalene, Syntex Adjuvant Formulation (SAF), Synthetic polynucleotides (poly IC/poly AU), TiterMax Tomatine, Vaxfectin, XtendIII, and Zymosan. Often, the vaccine composition includes an immune checkpoint inhibitor. In some cases, the immune checkpoint inhibitor is selected from one or more of the group consisting of a PD-1 inhibitor, a PD-L1 inhibitor, and a CTLA-4 inhibitor. Often, the immune checkpoint inhibitor is selected from one or more of the group consisting of Pembrolizumab, Nivolumab, and Atezolizumab. In some cases, the method further comprises administration of the personalized vaccine to the individual. Often, the vaccine is administered via a route selected from the group consisting of subcutaneous, intradermal, intramuscular, intranasal, intravenous, and sublingual. In some cases, the individual is a mammal. Often, the individual is a human, a cat, a mouse, a rat, a rabbit, a horse, a cow, or a pig. In some cases, the cancer is selected from the group consisting of Acute lymphoblastic leukemia, Acute monocytic leukemia, Acute myeloid leukemia, Acute promyelocytic leukemia, Adenocarcinoma, Adult T-cell leukemia, Astrocytoma, Bladder cancer, Bone Cancer, Brain Tumor, Breast Cancer, Burkitt's lymphoma, Carcinoma, Cervical Cancer, Chronic Lymphocytic Leukemia, Chronic myelogenous leukemia, Colon Cancer, Colorectal cancer, Endometrial cancer, Glioblastoma multiforme, Glioma, Hepatocellular carcinoma, Hodgkin's lymphoma, Inflammatory breast cancer, Kidney Cancer, Leukemia, Lung cancer, Lymphoma, Malignant Mesothelioma, Medulloblastoma, Melanoma, Multiple myeloma, Neuroblastoma, Non-Hodgkin Lymphoma, Non-Small Cell Lung Cancer, Ovarian Cancer, Pancreatic Cancer, Pituitary tumor, Prostate cancer, Retinoblastoma, Skin Cancer, Small Cell Lung Cancer, Squamous cell carcinoma, Stomach cancer, T-cell leukemia, T-cell lymphoma, Thyroid cancer, and Wilms' tumor.

### BRIEF DESCRIPTION OF THE DRAWINGS

[0008] The patent or application file contains at least one drawing executed in color. Copies of this patent or patent application publication with color drawing(s) will be provided by the Office upon request and payment of the necessary fee.

[0009] Certain novel features of the presently claimed invention are set forth with particularity in the appended claims. A better understanding of the features and advantages of the present invention will be obtained by reference to the following detailed description that sets forth non-limiting and non-exhaustive illustrative embodiments, in which the principles of the invention are utilized, and the accompanying drawings of which:

[0010] FIG. 1A and FIG. 1B show a bioinformatics comparison demonstrating that FS are superior neo-antigens to point mutations. MHC Class I and II prediction for MS FS peptides and point mutation peptides. FS: MS FS peptide, FS WT: FS peptide paired WT peptide, PM_Mut: point mutated peptide, PM_WT: point mutation paired WT peptide. Reference human HLA types are used. FIG. 1A describes 1,259 10-aa peptides were generated using the same method as i for MHC I prediction, y axis was the best prediction percentile rank for each peptide, reference human HLA types are used. FIG. 1B describes 1,242-point mutation peptides were somatic cancer genome missense point mutations, 20 aa peptides were generated from the point mutation site, same number of 20-aa MS FS peptides and paired WT peptides were used for comparison, y axis was number of hits with percentile rank <10 in MHC II prediction.

[0011] FIG. 2 shows a model of the FS antigens from the FS RNA variants and illustrates the basic theory behind the importance of RNA generated FS peptides from mis translation through microsatellites. Normal Cell: Errors in DNA replication are very low and repaired. Transcription error rates are higher but also rare as are mis-splicing in intron excision. Any frameshift (FS) transcript with premature stop is the degraded target of nonsense-mediated decay (NMD). Aberrant proteins, including those with frame-shifts are largely eliminated by the protein quality control system. The net result is that very few FS peptides are presented on MHC I/II or escape the cell to be presented to the immune system. Cancer Cell: In general more RNA is produced and increased error rates are observed at the DNA, RNA, and protein levels. More errors are made in DNA replication, but only in dividing cells. Most DNA mutations are single nucleotide changes and encode low or non-immunogenic peptides. Transcription is generally less accurate, especially through microsatellites (MS), producing insertions and deletions (Indels). Most transcribed genes with MSs in the coding region will have more FS transcripts. RNA splicing is also far less accurate in cancer cells, creating more FS transcripts from each out of frame splicing between exons form the same gene and different genes. The large increase of the FS transcripts from Indels of MS and mis-splicing overwhelms RNA quality control systems, such as NMD. Consequently, more truncated proteins with the FS peptide will be translated. These un-folded proteins, combining with aberrant proteins from other variants, overwhelms the protein quality control system leading to more FS peptides being presented on MHC I/II and mis-secreted or released from the cancer cell and elicit an immune response.

[0012] FIG. 3 shows cancer EST has more MS INDELs than normal EST. An analysis of homopolymer (repeat bp>6) MS INDEL rate in EST database between different cancer and normal libraries. * indicate P<0.0001.

[0013] FIG. 4 shows MS INDELs only exist in RNA not DNA. Examples of the sequence traces of MS region in SEC62 homolog genes in paired DNA/cDNA samples. Four human breast cancer cell lines were sequenced: HTB26, CRL2315, CRL1504, CRL2326; 5 dog mast cell tumors and 3 dog carcinomas. They all showed similar pattern, where the A MSs have an A insertion in RNA not in DNA.

[0014] FIG. 5 shows an example of frameshift peptides produced by either an insertion or deletion in the A MS in the Sec62 gene.

[0015] FIG. 5 discloses SEQ ID NOS 7268-7273, respectively, in order of appearance.

[0016] FIG. 6 shows a comparison of the current approach to making personal cancer vaccines (PCV) versus the much simpler and faster system (SPCV) provided herein.

[0017] FIG. 7 shows SPVC system potentially works with low DNA mutation burden patients, which the regular PCV cannot identify enough neo-antigen for the PCV. The SPCV can cover all cancer patients, including-30% low mutation burden cancer patients.

[0018] FIG. 8A, FIG. 8B, and FIG. 8C show 400K FSP array screen antibody reactive in cancer patient and examples of using the SPCV system identify FS antigens for personalized cancer vaccine. FIG. 8A shows an example of 500 most common positive FSPs and 500 negative FSPs form 17 serum samples per cancer, BC: breast cancer; GC: gastric cancer; GBM: glioblastoma; LC: lung cancer; PC: pancreatic cancer; cBC: children brain cancer, n=12) and 64 normal control samples. A red spot indicates the serum sample (Y axis) has positive antibody reactive to the FSP (X axis). The positive cut off value of each peptide was calculated by the average plus two fold of standard deviation of the normal controls' signal of that peptide. FIG. 8B shows an example of personalize FS antigens selection for 4 GBM patients. 20 FS positive antigens were selected from the highest IgG activity fold change to the cut-off value in each patient. FIG. 8C shows an example of personalized FS antigen selection for 4 pancreatic cancer patients.

[0019] FIG. 9 shows screen dog cancer serum with a smaller FSP array. The reactive FSPs have protection and correlated with vaccine elicited antibody reactive. The FSP array analysis of the dog serum. 8 types of 116 dog cancer serum and 52 non-cancer serum were analyzed by the small FSP array. Each red spot indicates the serum has positive antibody reactive with this peptide.

[0020] FIG. 10A, FIG. 10B, FIG. 10C, and FIG. 10D show screen dog cancer serum with a smaller FSP array. Reactive FSPs showed protection in the mouse melanoma and breast cancer models. FIG. 10A shows reactive and non-reactive FSPs from the same microsatellite frameshift antigen of C1S. FIG. 10A discloses SEQ ID NO: 7274. FIG. 10B shows 3 groups of mice were used: the control group was immunized with control plasmid, non-reactive FSPs pool and reactive FSP. All 3 groups received 2 rounds of genetic immunization with gene gun and peptide boost via subcutaneous injection. The B16F10 cell line was used for the melanoma model and the 4T1 cell line was used for breast cancer model. Each group had 10 mice. FIG. 10C shows reactive FSPs slowed tumor growth significantly compared to the non-reactive FSPs pool and the control group in the melanoma model (student's t-test, p-value <0.01), error bar represented mean±SEM. FIG. 10D shows the reactive FSPs offered tumor protection in mouse breast cancer model as well. The tumor volume was significantly lower than control group and non-reactive FSPs pool group (student's t-test, p-value<0.05).

[0021] FIG. 11 shows data screening dog cancer serum with a smaller FSP array. The reactive FSPs were shown to be protective and correlated with vaccine elicited antibody reactivity. Tumor volume was linearly correlated to antibody response against vaccinated reactive FSPs in the 4T1 breast cancer model. Tumor volume at the end point was used for analysis. The antibody response was measured by ELISA after PB2 and at the end point. R-COMP peptide was encoded in a plamsid and used as an internal control for genetic immunization. The p-value was calculated for linear fit of antibody response against tumor volume.

[0022] FIG. 12 shows that the negative FSPs have more pathogen epitopes than the highly active FSPs. This figure compares the negative FSPs with active FSPs in cancers. All negative FSPs and the FSPs with >10% positive rate in cancers from FIG. 9 were selected for analysis. A BLAST search against the Immune Epitope Database (IEDB) shows differential similarity with pathogen of peptides from these two sets of FSPs. Each peptide was searched using BLAST against epitopes in the IEDB and all the epitopes having an e value less than 10,000 were recorded as the matches. The number of the matched epitopes of each peptide was put into boxplot and represented the pathogen similarity of that peptide. The difference in similarity was statistically calculated with T-test P<0.05.

[0023] FIG. 13A and FIG. 13B show identification of personal reactive FS antigens and detection of the T cell responses to some of these FS antigens in the same dog. Screening of 6 dogs with cancer for specific cancer vaccine candidates. FIG. 13A shows a corner of the scanned FS array of each cancer dog analysis. FIG. 13B shows normalized antibody active to each peptide of each cancer dog. Both FIG. 13A and FIG. 13B showed each dog has personal highly reactive FS peptides.

[0024] FIG. 14 shows identification of personal reactive FS antigens and detection of the T cell responses to some of these FS antigens in the same dog. Testing T-cell reactivity of candidate peptides for vaccine. For a specific dog screened using the arrays in FIG. 9, 5 FS antigens that were highly antibody reactive were tested in ELI-Spot assays. PBMCs from the dog blood were purified, stimulated with pooled peptides from each FS antigen candidates and the number of positive cells counted. The number for positive for each FS antigen stimulant is shown. As can be seen all 5 FS antigens showed significant T-cell reactivity compare to the medium control

[0025] FIG. 15A, FIG. 15B, and FIG. 15C show the result of the dog cancer vaccine safety trial. FIG. 15A shows an exemplary trial schedule. FIG. 15B shows an ELISA analysis of the IgG reactive to the vaccine. FIG. 15C shows IFN-r ELISPOT analysis of the T cell response to the vaccine.

[0026] FIG. 16 A and FIG. 16B show that FSPs have significant protection as vaccine candidates in different mouse tumor model for the three selected MS FSPs. FIG. 16A shows tumor growth curve by three MS FS antigens immunization with 4T1-BALB/c tumor model. Mice (n=10 per group) were genetically immunized at 8 weeks of age, boosted twice genetically 3 weeks later with two days apart and another peptide boost 2 weeks later. Mice were challenged 2 week later by subcutaneous injection of 5×10³ 4 T1 cells. All vaccine groups significantly delayed tumor growth. FIG. 16B shows ELISPOT analysis of the three MS FS antigen immunization. 3 mice were genetically immunized with pool of the three MS FA antigens and genetically boosted 6 weeks later. Immunized mice were challenged by 5×10³ 4 T1 cells 3 weeks later. Splenocytes were collected at 19 days after tumor challenge and pool three splenocytes for the assay. Error bars represent SD.

[0027] FIG. 17A and FIG. 17B show that FSPs have significant protection as vaccine candidates in different mouse tumor model. Tumor growth of curve the vaccine test of the two FSPs pool from short and long MS in 4T1-BALB/c tumor model. FIG. 17A shows tumor growth curve with short MS FSPs vaccine group. FIG. 17B shows tumor growth curve with long MS FSPs vaccine group.

[0028] FIG. 18 shows that FSPs have significant protection as vaccine candidates in different mouse tumor model. Therapeutic immunization with FS antigens against ovarian cancer in mouse model. FIG. 18A shows female C57BL/6 mice (n=10) were challenged intraperitoneally with ID8 (5×10⁵ cells/mice) at day 0 and then, immunized subcutaneously 3 times with pool of FSPs (RNA-FsNeoAg)(10 FS from MS INDEL and 3 FS from mis-splicing) or neo antigens from DNA mutations (DNA-NeoAg) at days 3, 6 and 78. Control group mice were injected PBS buffer. FIG. 18B shows the vaccine group received additionally a checkpoint inhibitor treatment (CPI) composed by antibody anti-PD-L1 and CTLA-4, six times divided in two sets. Mice were weighing once a week until reach endpoint.

[0029] FIG. 19 shows the SPCV system successfully identified protective personalized cancer vaccines in two mouse tumor models. Protection by personalized pool FS neoantigens in 4T1 BALB/c tumor model. Serum from BALB/c mice (n=10/group) were collected two days previous and 7-days post subcutaneous injection of 4T1 tumor cells (500 cells/mouse). Both sera were run on microarray slides containing peptides for human FS neoantigens and the 10 mouse homologs neoantigens with higher median normalized signal on the array were selected as targets for the vaccines formulations for each mice. Mice were vaccinated subcutaneously on days 12 and 19. For the immunization group with the combined immunotherapy, the antibody treatment, anti-PD-L1 and CTLA-4, were administrated intraperitoneally on days 12, 15, 19, 22. Control group (non-treated) was immunized with PBS at the same schedule as the vaccine groups. Non-reactive groups were immunized with Fs antigens without signal in the microarray before and after tumor challenge, and followed the same vaccine regimen as the other groups. * p<0.05; **p<0.01; ***p<0.001, analyzed by two-way ANOVA with Bonferroni multiple comparisons post-test.

[0030] FIG. 20 shows the SPCV system successfully identified protective personalized cancer vaccines in two mouse tumor models. Female FVB/N mice (n=22) were evaluated weekly for the presence of palpable tumor, when tumor was detected sample blood was collected and run on microarray slides containing peptides for human FS neoantigens. The 10 mouse homologs neoantigens with higher median normalized signal compared to age matched FVB/NJ samples on the array were selected as targets for the vaccines formulations for each mice. Mice were vaccinated subcutaneously with pool of Fs peptide with minimum two doses and maximum seven doses, as needed to maintain tumor control, with intervals 1-2 weeks between doses. Each vaccine dose was followed by checkpoint inhibitor treatment (antibody anti-PD-L1 and anti-CTLA-4) (CPI), two doses, three days a part. As a control, animals were immunized with PBS (non-treated) at the same schedule as the vaccine groups or only with CPI treatment (CPI only), twice per animal. Personalized Fs vaccine conferred 68.2% of protection.

### DETAILED DESCRIPTION

[0031] Presented herein is a totally new approach to personalized cancer vaccines that overcome the limitations of conventional methods. The advent of the use of immunotherapeutics has resulted in emphasis on the importance of neo-epitopes in the immune response to cancer. Neo-epitopes are peptides that are normally not produced to an immunologically recognized level in healthy cells, but are so in tumors. They are essentially foreign epitopes. Of the neo-epitopes, frameshifts peptides are the best antigens as shown in FIG. 1. FS neo-antigens were the basis for the first tumor agnostic approval of a checkpoint inhibitor. It has been established based on sequencing the DNA of ˜100,000 tumors that millions of neo-antigens are produced by tumors, with very few of them repeated in different tumors, even among tumors the same type and FS mutation at the DNA level are very rare. Therefore, it has been conventionally thought that to develop a personalized cancer vaccine, each tumor would need to be sequenced as well as the non-tumor cells (germline) for each person. Further, it is not feasible to create a library of all the possible neo-antigens to create a personal vaccine. Therefore, each set of neoantigens would have to be customized and manufactured for each patient after the determination of the appropriated vaccine components. Since most neo-antigens are the product of point mutations, and only a small portion of these are immunogenic (˜3%) in patients, current methods involve application of a complicated informatics approach to predict the best vaccine components. The current basic concept as described in the art is that personal neoantigens in one's tumor are developed by sequencing the patient's tumor. The germline sequence of the patient would also be analyzed for comparison purposes. The developed neoantigens would then be informatically screened to predict which are likely to be immunogenic, and a vaccine manufactured for these particular antigens and delivered in a timely fashion to the patient. In some instances, it is envisioned that this personal vaccine would be delivered with a checkpoint inhibitor. However, personal cancer vaccine development and the checkpoint inhibitor are both expensive. We have developed a system to create a personal vaccine that is much faster and less expensive than existing methods, yielding more immunogenic antigens for a personal cancer vaccine.

[0032] We have discovered that a smaller subset of neo-antigens (“frameshift neo-antigens”) can be utilized to develop a personalized cancer vaccine. This is an important advance because the number of frameshift (FS) neo-antigens is much smaller than the total of all possible neo-antigens. We have discovered that FS peptides are frequently and recurrently produced in tumor cells. These FS peptides are produced by insertion and deletion variants (INDELS) occurring in microsatellite regions or by mis-splicing of RNA (FIG. 2). The microsatellite generated FS are predictable and will be made in each tumor that expresses the gene containing them. The mis-splicing events are also predictable and the ones that actually occur are detectable by the FS peptide arrays described. Our discovery that FS antigens occur more frequently and more recurrently in different tumors in the RNA by transcription or mis-splicing is surprising (FIG. 3). These INDEL variants only exist in the RNA, not in the DNA (FIG. 4). There are approximately 14,000 potential FS peptides transcribed from microsatellites in exons and approximately 200,000 potential FS from mis-splicing. We have also discovered that tumors make INDEL variants (FIG. 5) in most microsatellites and that mis-splicing is also recurrent at the same genes in tumors. We can also further limit the number of FS vaccine candidates by restricting them to ones that are at least 8 amino acids long and/or in oncogenes, essential genes and or highly expressed genes. These genes would be more difficult for a tumor to evolve away from. Therefore, it is only necessary to screen a limited number of approximately 1000 to 200,000 FS peptides to determine the components of a personal vaccine. This screen can be done in a day or less, rather than a month or more by current practice, and at much lower cost.

[0033] Disclosed herein are several methods and systems for such non-sequencing based screens. All approaches to date described in the art begin with sequencing the DNA and RNA of the patient. An important aspect of our approach is that our immunological screens indicate that the FS peptides are produced by the tumor and are reactive with the immune system, which is not the case with current protocols which only sequence the RNA to determine if the gene is transcribed. Further, the number of candidate FS antigens could be restricted to a low enough number to allow the vaccine components, i.e. frameshift neo-antigens, to be pre-synthesized and the personal vaccine readily formulated for each patient. This potentially simplifies regulatory approval of the personal vaccine approach by making uniform certain constituents of the personal vaccine across patient populations.

[0034] A comparison of the current approach to making personal cancer vaccines (PCV) (as described in patents, for example US 2016101170) to our method of making simple personal cancer vaccines (SPCV) disclosed herein is illustrated in FIG. 6. The two systems vary fundamentally at almost every step:

[0035] Step 1. The PCV requires taking a biopsy of the patient's tumor. In contrast, the SPCV only requires a small amount of blood. Because blood can readily be obtained, unlike tumor biopsies, the patient can be continuously monitored relative to the vaccine response and tumor status.

[0036] Step 2. In the PCV the tumor DNA and RNA are sequenced, as well as the patient's germline, to find to determine candidate tumor mutations. In the SPCV, blood samples are assayed to directly determine which tumor variants are both expressed and have an immune response in the patient.

[0037] Step 3. The PCV system requires applying an algorithm to estimate which of the mutations might be expressed as peptides and the immune system would respond to. This is not required by SPCV, since any expressed FS of 8aa or longer would be highly likely to elicit an immune response. Moreover, since the screen is for immune reactivity, the results directly indicate that the neo-antigen is expressed and immune reactive.

[0038] Step 4. In several embodiments of the peptide arrays in SPCV, the numbers are small enough that the peptides could be pre-made. This would allow, for example, screening candidate peptides directly in T-cell assays to determine specific immunogenicity in patients. This is not practical for the PCV approach as it would take too long to get the information.

[0039] Step 5. In the PCV system it is expected it will take at least 2 weeks or more to manufacture the vaccine for the patient. Currently it takes months. Because the domain of possible mutations in PCV assays is so large, the manufacturing will need to be specific for each person. In contrast, in several embodiments of the SPCV arrays, the number of variants are small enough such that the collection of possible vaccines can be pre-made, greatly reducing the time to get back to the patient. This would also allow the vaccine components to be pre-validated by the FDA, which currently cannot be done for the PCV system and thus poses a potential regulatory problem. These comparisons are summarized in Tables 1 and 2. In the PCV system even if the manufacture of the vaccine as peptide or nucleic acid can be improved to take less time, the SPCV system is inherently still better as the FS antigens will be much more broadly immunogenic.

[0040] Step 6. The current PCV cannot find enough neo-antigens from low mutation burden cancer patients, which is about 30% of total cancers and almost 100% of certain types of cancer. The SPCV potentially works all types of cancers (FIG. 7).

TABLE 1
Comparison of PCV versus SPCV

| | Traditional PCV | SPCV |
|---|---|---|
| Ag Identification | ≥2 weeks | 1~5 days |
| Ag Immunogenicity | Algorithm Predicted | confirmed |
| | (3%) | |
| Vaccine Production | ≥2 weeks | 1 days |
| Cost | $$$ | $ |

TABLE 2
Peptide Numbers

| | peptide | |
|---|---|---|
| FS mutation category | number | methods for screening |
| All Possible FS mutations | ~2*10⁶ | Phage or RNA display |
| All possible splice variants FS | ~6*10⁵ | In situ synthesized arrays |
| All MS FS | ~2*10⁴ | Spotted arrays |
| All MS FS in Driver genes | ~2*10³ | Spotted arrays or micro |
| | | titer plates |
| All MS FS in Essential genes | ~1.6*10³ | Spotted arrays or micro |
| | | titer plates |

[0041] Disclosed herein are streamlined, cost effective, and efficacious methods to design and produce personal vaccines, such as personal cancer vaccines. Methods herein include methods of determining the optimal components of a vaccine to be given to an individual to treat the cancer in that individual. Such methods include determining whether a candidate vaccine peptide is both expressed in the tumor of the individual and elicits an immune response in the individual. In some embodiments, the methods herein disclosed comprise obtaining a blood sample from an individual diagnosed with a cancer or a pre-cancer, diluting the blood sample in a buffer, contacting the diluted blood sample to a collection of peptides, wherein the collection of peptides comprises predicted frame-shift peptides that may be produced by a cancer cell from the individual. In some embodiments, the collection of peptides is an array, a high density array, a phage library, a plate-based assay, or other means of assembling a pre-determined collection of frame-shift peptides for testing against patient samples, including blood, serum, plasma, saliva, cerebrospinal fluid, and others. The results of the assay determine which peptides have strong (e.g. K_{D}>10⁻⁸) binding to antibodies in the patient's blood compared to an average binding in blood from people without cancer or compared to a sample taken from the individual before they had cancer. In additional embodiments, variant peptides could be used in assays for T-cell reactivity using cells from the same patient. Peptides eliciting a strong response in T-cell activity assays are more likely to be good vaccine components, an assay which can be personalized with an individual's T-cell samples. Those peptides with high reactivity can form the basis of a personal vaccine to treat the individual's cancer. Variants or FS antigens herein are the products of alterations at the RNA level, such as errors in transcription of RNA processing. This is in contrast to germline “mutations” which occur in the DNA and are heritable.

[0042] Vaccines designed using methods herein could comprise the personalized set of peptides in a number of forms, including as a DNA vaccine, a peptide vaccine, an RNA vaccine, a viral vaccine, a bacterial vaccine or combinations thereof. Vaccines herein can also be loaded or incorporated into antigen presenting cells, such as dendritic cells or macrophages and the loaded cells administered to the individual. Alternatively, genes encoding the vaccine antigens can be used to transform antigen presenting cells through techniques known by those of skill in the art such as CRISPR, transfection, viral or vector transduction, or other gene transfer or incorporation technology.

[0043] Vaccines designed using methods herein could also be given to an individual to prevent reoccurrence of a cancer. Collections of peptides herein developed in individual patients could also be used, for example, to diagnose cancer in other patients.

[0044] The variant peptides comprising the collection for screening could be from several sources. They could be peptides known to result from point mutations, frameshifts, deletions/insertions or translocation in tumor DNA. Because these types of mutations are personal and occur infrequently, it would take a large number of peptides to represent all of them. Conventional practice is to determine neo-antigens encoded at the DNA level and then confirm expression at the RNA level. We have unexpectedly discovered that errors occur much more frequently at the RNA processing level. Since microsatellites in coding regions are predicted and limited in number, one can predict a small set of FS peptides resulting from insertion or deletions during transcription that will produce FS neo-antigens. Therefore, methods herein, in some embodiments, comprise screening frameshift variants formed from 1) insertions or deletions in microsatellites in coding regions or 2) from mis-splicing events either in or between genes that create an out-of-frame fusion. These variants have several attractive features as sources for a personal vaccine component. First, frameshift variants generally have variant peptide sequences of over more than 8 amino acids. In contrast with point mutations that often only alters one amino acid, a FS variant is completely foreign sequence and therefore is much more likely to be immunogenic. Our work indicates that there are only a few thousand frameshifts from microsatellite insertion/deletions that are more than 8 amino acids long. Frameshifts of 8-60 amino acids long are very likely to include MHCI and MHCII epitopes. Further, because of their increased immunogenicity, FS variants are much more likely to create both T- and B-cell responses. Therefore, fewer peptides are required to be screened to determine vaccine components. Point mutation neo-epitopes are unlikely to produce both B and T-cell responses. Even though the arrays we developed (FIG. 8 A and FIG. 9) record B-cell responses to the FS peptides, the antibody response level on the arrays correlates with the tumor protection (FIG. 10 and FIG. 11). This may be because the antibody response requires CD4 help and it has been discovered that CD4 responses are important for protection. Further, the realm of FS space is much more restricted than that of all possible point mutations. This is particularly true for INDELS in microsatellites in coding regions. There are 2 possible FS that can be predicted from each of the 7000 microsatellites in coding regions. These numbers become smaller as putative peptides are filtered for restrictions for minimal length (e.g. >7aa) and the probability of eliciting immune responses. This makes it feasible to have a pre-existing set of FS peptides made that can be used to screen the T-cells of a patient for reactivity.

[0045] Peptides to be screened by the methods herein are produced and displayed in a number of ways. For example, in some embodiments the peptide candidates are synthesized and spotted on arrays. In some embodiments, arrays have about 100 selected FS peptides. In some embodiments, arrays have about 200 selected FS peptides. In some embodiments, arrays have about 300 selected FS peptides. In some embodiments, arrays have about 400 selected FS peptides. In some embodiments, arrays have about 500 selected FS peptides. In some embodiments, arrays have about 600 selected FS peptides. In some embodiments, arrays have about 700 selected FS peptides. In some embodiments, arrays have about 800 selected FS peptides. In some embodiments, arrays have about 900 selected FS peptides. In some embodiments, arrays have about 1000 selected FS peptides. In some embodiments, arrays have about 10,000 selected FS peptides. In some embodiments, arrays have about 20,000 selected FS peptides. In some embodiments, in-situ synthesis could produce an array having 1,000,000 or more peptides per array, or at least 1000, 10,000, 100,000 or 400,000 (FIG. 8, FIG. 9) peptides per array.

[0046] In an exemplary method of developing a personalized cancer vaccine, the blood from a cancer patient is diluted and applied to the array. After incubation the array is washed and the bound patient's antibodies are detected with a labeled secondary antibody, for example a fluorescently labeled secondary antibody. The secondary antibody can be to any combination of one or more isotypes, including but not limited to IgG1, IgG2, IgG3, IgG4, IgA1, IgA2, IgD, IgM, and IgE. The level of fluorescence indicates the amount and/or affinity of the antibody to the FS peptide. We have shown that the relative binding correlates to protection (FIG. 11). The assay may be optimized to selectively detect high affinity binding of antibodies to their cognate FS antigen. The reactivity can be compared to the reactivity seen in healthy people without cancer or to a previous baseline blood sample of that same patient. The readout is the antibody response to particular FS peptides. A positive response indicates that the peptide must be made in that tumor and that the immune system has reacted to it. Sequencing the DNA or RNA from the tumor does not convey either of these important pieces of information. Sequence analysis of the negative IgG reactive FSPs showed that these FSPs contain more pathogen epitopes (FIG. 12). It is contemplated that the frequently contacting different pathogen in regular life induces the tolerance to these epitopes and consequently, decreases the effective immune responses to the FPSs containing these epitopes. The approach disclosed herein gives a direct readout of the antibody response to the FS peptides, which is important information in designing a vaccine. Antibody binding to a FS peptide could also be detected by any number of label-free methods.

[0047] Accordingly, in some embodiments, selecting candidate FSPs for a personalized cancer vaccine herein, comprises determining the sequence similarity to known pathogen epitopes and selecting FSPs that do not show sequence similarity to known pathogen epitopes. Known pathogen epitopes comprise peptides catalogued in the Immune Epitope Database (IEDB, available on the internet at iedb.org). In some cases, candidate FSPs are searched via a BLAST algorithm against pathogen epitopes in the IEDB. In some embodiments, a candidate FSP is selected for having a BLAST e value less than 10,000.

[0048] A T-cell response, in some embodiments, is important for killing cancer cells. Since the FS peptides are generally 8 aa or longer, it is very likely that a FS peptide will have a region that would bind to the patient's MHC to initiate an immune response. MHC binding can be predicted from commonly available algorithms. Alternatively, the blood sample from the patient could be screened for T-cell activity to the peptide candidates using a T cell assay, such as a proliferation assay, a cytokine assay, a cytotoxicity assay, a degranulation assay, flow cytometry, or combination thereof.

[0049] Methods of designing personalized cancer vaccines disclosed herein would not only provide much more relevant information for making a vaccine, but it would have benefits over the existing methods such as simplicity and cost efficacy. It would not require a biopsy of the tumor with the inherent cost, discomfort and danger. The assay itself would be simpler, less expensive and faster than deep sequencing the tumor DNA. The mutations identified in the DNA are most likely to be the result of point mutations which have a low probability of being produced by a patient, or at least immunogenic. Current sequencing protocols are very poor at identifying insertions/deletions in microsatellites or mis-splicing events. The best source of peptides (FS) would be missed by current sequencing protocols. Sequencing a biopsy will only identify mutations in that part of the tumor and mutations in other parts will be missed. By methods disclosed herein, all immune reactive parts of the tumor will be identified. The identification of vaccine components by sequencing will require the application of proprietary algorithms and other assays to identify potentially produced and immunogenic peptides. In contrast, this information is directly readout from our assay. While the broadest application may be for cancer, the same procedure would apply for a vaccine against other chronic diseases. Vaccines based on the MS FS herein could also could eliminate cells that are not tumors but are aberrant for other reasons. Such aberrant, dysfunctional cells play a role in diseases such as diabetes, Alzheimer's disease, aging, autoimmune disease, chronic infections, and other diseases.

### Microsatellite and Splicing FS Variants

[0050] Methods herein, in some embodiments, comprise methods of frameshift variant development for inclusion in personal cancer vaccine development. Frameshift variants, as referred to herein, are alterations in an mRNA caused by errors in transcription, causing an insertion or deletion (INDEL) of one or two nucleotides in the mRNA or by mis-splicing of RNA resulting in a change in the amino acids of the resulting protein that are encoded after the frameshift variant. Methods of frameshift variant development herein include but are not limited to mRNA sequencing and array based hybridization. In some embodiments, frameshift peptides are developed by bioinformatics analysis of already available sequence data. FS variants peptides due to INDELs in MS can be directly inferred from the genome sequence data. Any INDEL in a coding sequence will produce FS if expressed. On the other hand a specific exon mis-splicing may or may not be produced. Therefore, this application focuses on the MS FS, all of which will be produced.

[0051] In some embodiments, mRNA sequencing for development of frameshift variants herein includes a method where mRNA from a tumor or cancer tissue is sequenced. In some embodiments, mRNA is purified from a tumor or cancer tissue from a patient. In some embodiments, mRNA is isolated from total mRNA from the tumor or cancer tissue. In some embodiments, mRNA is isolated using oligo-dT purification of total RNA. In some embodiments, mRNA is targeted for sequencing using an oligo-dT to prime the RNA sample. In some embodiments, the mRNA is amplified before sequencing. In some embodiments, the mRNA is amplified by PCR before sequencing. In an embodiment the mRNA is sequenced by random priming of the cDNA to detect FS sequences. In some embodiments the mRNA is amplified by RT-PCR before sequencing. In some embodiments, mRNA sequencing comprises targeted sequencing of an mRNA having a microsatellite in the transcript. In some embodiments, mRNA is sequenced using at least one technique selected from Sanger sequencing, pyro-sequencing, ion semiconductor sequencing, polony sequencing, sequencing by ligation, nanoball sequencing, and single molecule sequencing.

[0052] Variants identified from mRNA sequencing are classified by type of variant. Variants may arise from mutations in DNA or alterations in the RNA during transcription or splicing herein, which include but are not limited to point mutations, silent mutations, insertions, deletions, cis-splicing errors, and trans-splicing errors. Of these, only insertions, deletions, cis-splicing errors, and trans-splicing errors are expected to lead to a frameshift in a protein produced from the mutant mRNA. Confirmed frameshift variants are those that when translated produce a protein with a different amino acid sequence at more than one residue at residues C-terminal to the alteration. Frameshifted polypeptide sequences resulting from frameshift variants are assembled for further analysis.

[0053] In some cases frameshift mutations are predicted based on microsatellite location in the genome. As transcripts having a microsatellite are more prone to transcription errors, frameshift polypeptides can be predicted to be resulting from an insertion or a deletion of one or two basepairs. Alternatively, frameshift polypeptides can be predicted by bioinformatics prediction of cis and/or trans splicing errors. A selection of all possible frameshift peptides can be assembled for further analysis.

Peptides from Frameshifts from MS Indels and Mis-Splicing

[0054] Frameshifted polypeptide sequences, determined by mRNA sequencing or prediction, are further analyzed to determine immunoreactivity. In some embodiments, immunoreactivity is measured by MHC or HLA binding. In some embodiments, immunoreactivity is measured by antibody binding. In some embodiments, immunoreactivity is measured by T cell activity. In some embodiments, immunoreactivity is measured by antibody binding and T cell activity.

[0055] Binding to MHC is required for T cell activity and can be determined by binding assays. Alternatively, in silico methods of MHC binding are used to predict binding of a peptide to a MHC subtype. Data of peptides binding to MHC subtype molecules are used to develop binding prediction algorithms. These algorithms calculate scoring matrices that quantify the contribution of each residue in a fixed-length peptide to binding to an MHC molecule. Algorithms predict binding of a peptide to class I MHC or class II MHC. Algorithms to predict class I MHC binding include but are not limited to Artificial neural network (ANN), Stabilized matrix method (SMM), SMM with a Peptide:MHC Binding Energy Covariance matrix (SMMPMBEC), Scoring Matrices derived from Combinatorial Peptide Libraries (Comblib_Sidney2008), Consensus, NetMHCpan, NetMHCcons and PickPocket. Algorithms to predict class II MHC binding, include but are not limited to Consensus method, Combinatorial library, NN-align (netMHCII-2.2), SMM-align (netMHCII-1.1), Sturniolo, and NetMHCllpan. The entire population of frameshift polypeptides is then scanned using one or more of the above algorithms for peptides binding to an MHC subtype molecule with a predicted affinity of IC50<500 nM.

### Identifying Frameshift Peptide Antibody Response

[0056] Candidate frameshift peptides for personalized cancer vaccines, in some embodiments, are screened for antibody reactivity in an individual needing treatment using a personalized cancer vaccine. Antibody reactivity is determined using an assay for antibody binding to a peptide. In some embodiments, peptides for antibody screening are bound to a substrate, such as a plate, a glass slide, a bead, or other substrate. Assays for antibody binding include but are not limited to ELISA, radio-immuno assay, western blot, surface plasmon resonance, immunostaining, immunoprecipitation, mass spectrometry, phage display, flow cytometry, cytometric bead array, immunohistochemistry, high density array, microarray, and combinations thereof.

[0057] In an exemplary embodiment, a blood sample is obtained from an individual needing treatment for breast cancer. The blood sample is diluted in an appropriate buffer and applied to a peptide microarray spotted with vaccine candidate frameshift peptides. The diluted blood sample is incubated with the peptide microarray overnight and the peptide microarray is then washed and exposed to a secondary antibody that binds to human IgG bound to the microarray. The secondary antibody is conjugated with Alexa Fluor 488 and the microarray is analyzed for fluorescence at each peptide spot. The peptides bound to the individual's antibodies are deemed immunoreactive and selected for the individual's personalized cancer vaccine.

[0058] In another exemplary embodiment, an individual is given an intradermal injection of each candidate peptide in a pre-determined pattern on the patient's back to measure delayed-type hypersensitivity (DTH) response. Erythema and induration are measured at 24, 48, and 72 hours. The peptides which elicit a DTH response are deemed immunoreactive and selected for the individual's personalized cancer vaccine.

### Identifying Frameshift Peptide T Cell Response

[0059] In some embodiments, candidate frameshift peptides are screened for T cell activity in cells obtained from an individual needing treatment using a personalized cancer vaccine. T cell activity is determined using a T cell assay measuring proliferation, cytokine secretion, cytotoxicity, or degranulation in response to a frameshift peptide bound to an antigen presenting cell. T cell assays include but are not limited to proliferation assay, 3H-thymidine assay, BrdU assay, CFSE assay, cytokine secretion assay, ELISA assay, ELISPOT assay, intracellular staining assay, quantitative rtPCR assay, cytometric bead array assay, MHC-tetramer binding assay, cytotoxicity assay, 51-chromium assay, degranulation assay, granulysin assay, granzyme A assay, granzyme B assay, and perforin assay.

[0060] In an exemplary embodiment, a blood sample is obtained from an individual needing treatment for breast cancer. PBMCs are isolated from the blood sample and the PBMCs are cultured to expand T cells in the sample and the T cells are incubated in culture media containing one or more candidate peptides for a cytokine release assay. The production of IFN-γ is analyzed in ELISPOT assays. Flat-bottom 96-well nitrocellulose plates are prepared and coated with either anti-human IFN-γ. Cells were then incubated at a density of 1×10⁵/well either with peptide pools or individual peptides (10 μg/ml), PHA (10 μg/ml), or medium (containing 1% DMSO corresponding to the percentage of DMSO in the pools/peptides) as a control. After 24 hours, cells are removed, and plates are incubated with HRP-conjugated anti-human IFN-γ Ab (Clone 7-B6-1, Mabtech) at 37° C. After 2 hours, spots corresponding to the HRP-conjugated Ab (IFN-γ) are developed with 3-amino-9-ethylcarvazole solution (Sigma-Aldrich, St. Louis, Mo.). Spots are counted by computer-assisted image analysis (Zeiss, KS-ELISPOT reader, Munich, Germany). Each assay is performed in triplicate. The level of statistical significance is determined with a Student's t-test using the mean of triplicate values of the response against relevant pools or individual peptides versus the response against the DMSO control. Criteria for peptide pool positivity are 100 spot-forming cells (SFCs)/10⁶ PBMC, p≤0.05 and a stimulation index (SI) while criteria for individual peptide positivity are ≥20 SFC/10⁶ PBMC, p≤0.05, and a SI≥2.

### Platforms for Screening Peptides for Personalized Cancer Vaccines

[0061] In some embodiments, disclosed herein are array platforms that allow for development of peptides suitable for personalized cancer vaccines. The array platforms comprise a plurality of individual features on the surface of the array. Each feature typically comprises a plurality of individual peptides synthesized in situ on the surface of the array or spotted on the surface, wherein the molecules are identical within a feature, but the sequence or identity of the molecules differ between features. Such array molecules include the synthesis of large synthetic peptide arrays.

[0062] The peptide arrays can include control sequences that match epitopes of well characterized monoclonal antibodies (mAbs). Binding patterns to control sequences and to library peptides can be measured to qualify the arrays and the assay process. Additionally, inter wafer signal precision can be determined by testing sample replicates e.g. plasma samples, on arrays from different wafers and calculating the coefficients of variation (CV) for all library peptides. Precision of the measurements of binding signals can be determined as an aggregate of the inter-array, inter-slide, inter-wafer and inter-day variations made on arrays synthesized on wafers of the same batch (within wafer batches). Additionally, precision of measurements can be determined for arrays on wafers of different batches (between wafer batches). In some embodiments, measurements of binding signals can be made within and/or between wafer batches with a precision varying less than 5%, less than 10%, less than 15%, less than 20%, less than 25%, or less than 30%.

[0063] The technologies disclosed herein include a photolithographic array synthesis platform that merges semiconductor manufacturing processes and combinatorial chemical synthesis to produce array-based libraries on silicon wafers. By utilizing the tremendous advancements in photolithographic feature patterning, the array synthesis platform is highly-scalable and capable of producing combinatorial peptide libraries with 40 million features on an 8-inch wafer. Photolithographic array synthesis is performed using semiconductor wafer production equipment in a class 10,000 cleanroom to achieve high reproducibility. When the wafer is diced into standard microscope slide dimensions, each slide contains more than 3 million distinct chemical entities. Maskless photolithography can also be used to create peptides arrays.

[0064] In some embodiments, arrays with peptide libraries produced by photolithographic technologies disclosed herein are used for immune-based assays. Using a patient's antibody repertoire from a biological sample bound to the arrays, a fluorescence binding profile image of the bound array provides sufficient information to classify which peptides are reactive with an antibody from the patient.

[0065] Platforms disclosed herein comprise a selection of frameshift peptides disclosed herein, such as peptides resulting from an insertion or deletion error in transcription of an mRNA or peptides resulting from a splicing error such as a trans-splicing error or a cis-splicing error. In some embodiments, platforms herein comprise frameshift peptides comprise peptides having a sequence selected from all MS FS or MS FS from oncogenes, essential genes, highly expressed genes, such as the peptides provided in SEQ ID NO: 1-7264.

[0066] In some embodiments, the array is a wafer-based, photolithographic, in situ peptide array produced using reusable masks and automation to obtain arrays of scalable numbers of combinatorial sequence peptides. In some embodiments, the peptide array comprises about 100, about 500, about 1000, about 2000, about 3000, about 4000, about 5,000, about 6000, about 7000, about 8000, about 9000, about 10,000, about 15,000, about 20,000, about 30,000, about 40,000, about 50,000, about 100,000, about 200,000, about 300,000, about 400,000, about 500,000, or more peptides having different sequences. Multiple copies of each of the different sequence peptides can be situated on the wafer at addressable locations known as features.

[0067] In some embodiments, the array is a glass slide or nitrocellulose membrane having in vitro synthesized peptides spotted in a predetermined pattern and screened for binding of antibodies in a biological sample from a patient.

[0068] In some embodiments, detection of antibody binding on a peptide array poses some challenges that can be addressed by the technologies disclosed herein. Accordingly, in some embodiments, the arrays and methods disclosed herein utilize specific coatings and functional group densities on the surface of the array that can tune the desired properties necessary for performing assays. For example, non-specific antibody binding on a peptide array may be minimized by coating the silicon surface with a moderately hydrophilic monolayer polyethylene glycol (PEG), polyvinyl alcohol, carboxymethyl dextran, and combinations thereof. In some embodiments, the hydrophilic monolayer is homogeneous. Second, synthesized peptides are linked to the silicon surface using a spacer that moves the peptide away from the surface so that the peptide is presented to the antibody in an unhindered orientation.

[0069] Platforms herein are also contemplated to include peptides in microtiter plates for determining T cell activity in response to frameshift peptides herein. In some embodiments, microtiter plates include but are not limited to 96 well, 384 well, 1536 well, 3456 well, and 9600 well plates. In some embodiments, more than one peptide is present in each well of a microtiter plate, i.e., the peptides are pooled and individual peptides eliciting T cell activity are determined by deconvolution of the positive and negative wells in the T cell assay.

### Screening for Immunogenic Peptides

[0070] Optionally, it is useful to determine immunogenicity of a candidate frameshift peptide for use in a personalized cancer vaccine. Immunogenicity, as used herein, refers to the ability of a substance, such as a peptide, to elicit an immune response, such as an antibody response or a T cell response, when administered to an individual, for example, in a vaccine formulation. For individuals, such as humans, with cancer it is the immune response to the tumor. In some embodiments, a peptide that reacts with an antibody or elicits T cell activity in a biological sample from an individual is not immunogenic when administered in a vaccine formulation. In some embodiments, a peptide that reacts with an antibody or elicits T cell activity in a biological sample from an individual is immunogenic when administered in a vaccine formulation. Immunogenicity is determined by methods of those of skill in the art including in animal model testing and using in silico prediction of immunogenicity. In silico immunogenicity prediction tools are available for free to the public, for example at the Immune Epitope Database and Analysis Resource (www.iedb.org).

[0071] Alternatively, mice, such as humanized mice, and mice transgenic for human HLA genes are used to determine the immunogenicity of a candidate frameshift peptide. The candidate frameshift peptide is administered to the transgenic mouse in a vaccine formulation. Response to the vaccine is determined using antibody assays and/or T cell assays described elsewhere herein. In the case of mice that are injected with a tumor or are transgenic to develop tumors, the protection of the frameshift peptide as a vaccine can be determined.

### Methods of Designing a Personalized Vaccine

[0072] Provided herein are methods of designing a personalized vaccine for an individual, the method comprising, a) obtaining a biological sample from the individual; b) determining immunoreactivity of the biological sample to a first population of peptides; c) preparing a vaccine composition comprising a second population of peptides that have immunoreactivity with the biological sample from the individual, wherein the second population of peptides is a sub-population of the first population. In some embodiments, the biological sample is selected from the group consisting of blood, plasma, serum, thymus, bone marrow, spleen, lymph node, bronchoalveolar lavage, breast, central nervous system, cerebrospinal fluid, eye, tears, gastrointestinal tract, saliva, feces, urine, heart, kidney, liver, lung, muscle, pancreas, peripheral nervous system, saliva, skin, thyroid, trachea, and tumor. In some embodiments, the biological sample is blood, serum, plasma, or saliva. In some embodiments, the biological sample comprises cells selected from B cells, T cells, CD4+ T cells, CD8+ T cells, Th17 cells, and combinations thereof. In some embodiments, the biological sample comprises an antibody.

[0073] Methods herein comprise administration of one or more immunoreactive polypeptides reactive to immune cells and antibodies, for example from an individual with cancer. In some embodiments, immunoreactivity comprises antibody reactivity. In some embodiments, immunoreactivity comprises a T cell response. A T cell response herein includes but is not limited to one or more of proliferation assay, 3H-thymidine assay, BrdU assay, CFSE assay, cytokine secretion assay, ELISA assay, ELISPOT assay, intracellular staining assay, quantitative rtPCR assay, cytometric bead array assay, cytotoxicity assay, 51-chromium assay, degranulation assay, granulysin assay, granzyme A assay, granzyme B assay, and perforin assay. Methods herein, in some embodiments, screen a first population for peptides binding to antibodies or eliciting a T cell reaction in a biological sample from an individual, wherein the first population of peptides comprises peptides encoded by a frameshifted mRNA expressed by a cancer cell. In some embodiments, the first population of peptides comprises peptides having a sequence selected from the peptides provided in SEQ ID NO: 1-7264. In some embodiments, each of the first population of peptides binds to at least one MHC subtype. In some embodiments, a portion of the first population of peptides binds to more than one MHC subtype. In some embodiments, each of the first population of peptides binds to at least on HLA subtype. In some embodiments, each of the first population of peptides comprises at least one T cell epitope. In some embodiments, at least one of the first population of peptides comprises at least one T cell epitope. In some embodiments, each of the first population of peptides comprises at least on B cell epitope. In some embodiments, at least one of the first population of peptides comprises at least on B cell epitope. In some embodiments, first population of peptides is bound to a substrate.

### Vaccine Compositions and Formulations

[0074] Personalized cancer vaccines herein comprise one or more peptides determined to have immunoreactivity with a biological sample from an individual in need of treatment for cancer. For example, personalized cancer vaccines, in some embodiments, comprise 1, 2, 3, 4, 5, 6, 7, 8, 9, 10, 11, 12, 13, 14, 15, 16, 17, 18, 19, 20, or more frameshift peptides determined to have immunoreactivity with a sample from an individual in need of treatment for cancer. In some embodiments, peptides for personalized cancer vaccines are selected from the peptides provided in SEQ ID NO: 1-7264.

[0075] In one embodiment the vaccine can consist of plasmids encoding the MS FS variants. DNA or Gene Vaccines consist of a plasmid with a promoter and appropriate transcription and translation control elements. The plasmids may also sequences that encode peptide or protein fusions to the FS peptide to enhance, for example, expression levels, intracellular targeting or proteasomal processing. For example the LAMP sequence when fused to a FS peptide sequence will enhance MHCII responses. In additional aspects, personalized cancer vaccines herein comprise one or more nucleic acids encoding peptides determined to have immunoreactivity with a biological sample. For example, in some embodiments, personalized cancer vaccines comprise one or more nucleotides encoding 1, 2, 3, 4, 5, 6, 7, 8, 9, 10, 11, 12, 13, 14, 15, 16, 17, 18, 19, 20, or more FS peptides determined to have immunoreactivity with a sample. In some embodiments, nucleotides encode peptides for personalized cancer vaccines selected from the peptides provided in SEQ IDNO: 1-7264. These plasmids can be introduced by a needle, a gene gun, an aerosol injector, with patches, via microneedles, by abrasion among many forms. In some forms the DNA vaccine is incorporated into liposomes or other forms of nanobodies. They may also be administered by inhalation or ingestion. The plasmid can be introduced into the blood, the thymus, the pancreas, the skin, the muscle, a tumor or other sites.

[0076] Alternatively or in combination, the peptides can be encoded in RNA that is directly introduced into the individual, such as a person. The RNA can be chemically synthesized or more commonly in vitro transcribed. The RNA will encode one or more FS peptides and will include signals to enhance stability and translation. The RNA may also include unnatural nucleotides to increase the half-life. These RNAs can be introduced by a needle, a gene gun, an aerosol injector, with patches, via microneedles, by abrasion among many forms. In some forms the RNA is incorporated into liposomes or other forms of nanobodies. They may also be administered by inhalation or ingestion. The RNA can be introduced into the blood, the thymus, the pancreas, the skin, the muscle, a tumor or other sites

[0077] Alternatively or in combination, the peptides coding sequences can be introduced into a virus as a vector. The peptide encoding sequences can be fused to other sequences that enhance transcription, translation or presentation to the immune system. These viral vectors include pox viruses, adenovirus, lentiviruses, retroviruses, alpha viruses and others using a needle, a gene gun, an aerosol injector, with patches, via microneedles, by abrasion among many forms. They may also be administered by inhalation or ingestion.

[0078] Alternatively or in combination, the peptides can be administered via a bacterial vector. The FS coding sequences are introduced into the bacteria, usually in the form of plasmid or lysogenic phage, and the bacteria administered to the patient. Listeria is commonly used in this way, but other bacteria could be used or developed. The bacteria can be administered by needle to the blood or intraperitoneal injection. Bacteria can also be administered orally.

[0079] The peptides can also be delivered as peptides. Usually the peptides are 10aa long or longer, preferably 25aa or longer. 25-40aa long may be ideal. Usually the peptides are fused to a carrier such as albumin, keyhole limpet protein etc. In some forms the peptides are incorporated into liposomes or other forms of nanobodies.

[0080] Personalized vaccine formulations herein comprise a personalized vaccine composition in a biologically acceptable formulation, gaseous, liquid or solid, or mixture thereof, which are suitable for one or more routes of administration, in vivo delivery or contact. Such formulations include solvents (aqueous or non-aqueous), solutions (aqueous or non-aqueous), emulsions (e.g., oil-in-water or water-in-oil), suspensions, syrups, elixirs, dispersion and suspension media, coatings, isotonic and absorption promoting or delaying agents, compatible with pharmaceutical administration or in vivo contact or delivery. Aqueous and non-aqueous solvents, solutions and suspensions may include suspending agents and thickening agents. Such pharmaceutically acceptable carriers include tablets (coated or uncoated), capsules (hard or soft), microbeads, powder, granules and crystals. Supplementary active compounds (e.g., preservatives, antibacterial, antiviral and antifungal agents) can also be incorporated into the compositions.

[0081] To increase an immune response and efficacy in treating cancer, peptides herein are optionally coupled to another protein such as ovalbumin or keyhole limpet hemocyanin (KLH), thyroglobulin or a toxin such as tetanus or cholera toxin. Peptides herein are also mixed with adjuvants or checkpoint inhibitors.

[0082] Adjuvants include, for example: ABM2, AS01B, AS02, AS02A, Adjumer, Adjuvax, Algammulin, Alum, Aluminum phosphate, Aluminum potassium sulfate, Bordetella pertussis, Calcitriol, Chitosan, Cholera toxin, CpG, Dibutyl phthalate, Dimethyldioctadecylammonium bromide (DDA), Freund's adjuvant, Freund's complete, Freund's incomplete (IFA), GM-CSF, GMDP, Gamma Inulin, Glycerol, HBSS (Hank's Balanced Salt Solution), IL-12, IL-2, Imiquimod, Interferon-Gamma, ISCOM, Lipid Core Peptide (LCP), Lipofectin, Lipopolysaccharide (LPS), Liposomes, MF59, MLP+TDM, Monophosphoryl lipid A, Montanide IMS-1313, Montanide ISA 206, Montanide ISA 720, Montanide ISA-51, Montanide ISA-50, nor-MDP, Oil-in-water emulsion, P1005 (non-ionic copolymer), Pam3Cys (lipoprotein), Pertussis toxin, Poloxamer, QS21, RaLPS, Ribi, Saponin, Seppic ISA 720, Soybean Oil, Squalene, Syntex Adjuvant Formulation (SAF), Synthetic polynucleotides (poly IC/poly AU), TiterMax Tomatine, Vaxfectin, XtendIII, and Zymosan.

[0083] Checkpoint inhibitors are inhibitors of proteins known to potentiate or inhibit an immune response and accordingly a checkpoint inhibitor increases the immune response. In some instances, tumors are known to upregulate checkpoint inhibitors to evade the immune response in a patient and checkpoint inhibitors allow the immune system of the patient to recognize and eliminate the tumor. Checkpoint inhibitors herein include but are not limited to a PD-1 inhibitor, a PD-L1 inhibitor, a CTLA-4 inhibitor, Pembrolizumab, Nivolumab, or Atezolizumab. They may be administered systemically or locally as an adjuvant.

[0084] Cosolvents may be added to a frameshift peptide composition or formulation. Non-limiting examples of cosolvents contain hydroxyl groups or other polar groups, for example, alcohols, such as isopropyl alcohol; glycols, such as propylene glycol, polyethyleneglycol, polypropylene glycol, glycol ether; glycerol; polyoxyethylene alcohols and polyoxyethylene fatty acid esters. Non-limiting examples of cosolvents contain hydroxyl groups or other polar groups, for example, alcohols, such as isopropyl alcohol; glycols, such as propylene glycol, polyethyleneglycol, polypropylene glycol, glycol ether; glycerol; polyoxyethylene alcohols and polyoxyethylene fatty acid esters.

[0085] Supplementary compounds (e.g., preservatives, antioxidants, antimicrobial agents including biocides and biostats such as antibacterial, antiviral and antifungal agents) can also be incorporated into the compositions. Pharmaceutical compositions may therefore include preservatives, anti-oxidants and antimicrobial agents.

[0086] Preservatives can be used to inhibit microbial growth or increase stability of ingredients thereby prolonging the shelf life of the pharmaceutical formulation. Suitable preservatives are known in the art and include, for example, EDTA, EGTA, benzalkonium chloride or benzoic acid or benzoates, such as sodium benzoate. Antioxidants include, for example, ascorbic acid, vitamin A, vitamin E, tocopherols, and similar vitamins or provitamins.

[0087] Pharmaceutical compositions can be formulated to be compatible with a particular route of administration. Thus, pharmaceutical compositions include carriers, diluents, or excipients suitable for administration by various routes. Exemplary routes of administration for contact or in vivo delivery which a composition can optionally be formulated include inhalation, respiration, intranasal, intubation, intrapulmonary instillation, oral, buccal, intrapulmonary, intradermal, topical, dermal, parenteral, sublingual, subcutaneous, intravascular, intrathecal, intraarticular, intracavity, transdermal, iontophoretic, intraocular, opthalmic, optical, intravenous (i.v.), intramuscular, intraglandular, intraorgan, or intralymphatic.

[0088] Formulations suitable for parenteral administration include aqueous and non-aqueous solutions, suspensions or emulsions of the active compound, which preparations are typically sterile and can be isotonic with the blood of the intended recipient. Non-limiting illustrative examples include water, saline, dextrose, fructose, ethanol, animal, vegetable or synthetic oils.

### Methods of Eliciting an Immune Response

[0089] Also provided herein, are methods of eliciting an immune response in an individual having cancer, the methods comprising, a) obtaining a biological sample from the individual; b) determining immunoreactivity of the biological sample to a first population of peptides; c) preparing a vaccine composition comprising a second population of peptides that have immunoreactivity with the biological sample from the individual, wherein the second population of peptides is a sub-population of the first population; and d) administering the vaccine composition to the individual, wherein administering the vaccine composition elicits an immune response in the individual against the cancer.

[0090] Methods herein comprise administration of one or more immunoreactive polypeptides reactive to immune cells and antibodies, for example from an individual with cancer. In some embodiments, immunoreactivity comprises antibody reactivity. In some embodiments, immunoreactivity comprises a T cell response. A T cell response herein includes but is not limited to one or more of proliferation assay, 3H-thymidine assay, BrdU assay, CFSE assay, cytokine secretion assay, ELISPOT assay, intracellular staining assay, quantitative rtPCR assay, cytometric bead array assay, cytotoxicity assay, 51-chromium assay, degranulation assay, granulysin assay, granzyme A assay, granzyme B assay, and perforin assay. Methods herein, in some embodiments, screen a first population for peptides binding to antibodies or eliciting a T cell reaction in a biological sample from an individual, wherein the first population of peptides comprises peptides encoded by a frameshifted mRNA expressed by a cancer cell. In some embodiments, the first population of peptides comprises peptides having a sequence selected from the peptides provided in SEQ ID NO: 1-7264. In some embodiments, each of the first population of peptides binds to at least one MHC subtype. In some embodiments, a portion of the first population of peptides binds to more than one MHC subtype. In some embodiments, each of the first population of peptides binds to at least on HLA subtype. In some embodiments, each of the first population of peptides comprises at least one T cell epitope. In some embodiments, at least one of the first population of peptides comprises at least one T cell epitope. In some embodiments, each of the first population of peptides comprises at least on B cell epitope. In some embodiments, at least one of the first population of peptides comprises at least on B cell epitope. In some embodiments, first population of peptides is bound to a substrate.

### Methods of Treatment

[0091] Provided herein, in some aspects, are methods of treating an individual in need of treatment for a cancer using a personalized cancer vaccine. An “individual” or “patient”, used interchangeably herein, refers to an individual or a patient selected from a human, a primate, a mouse, a rat, a rabbit, a cat, a horse, a cow, or a pig. Some such methods comprise, a) obtaining a biological sample from the individual; b) determining immunoreactivity of the biological sample to a first population of peptides; c) preparing a vaccine composition comprising a second population of peptides that have immunoreactivity with the biological sample from the individual, wherein the second population of peptides is a sub-population of the first population; and d) administering the vaccine composition to the individual, wherein administering the vaccine composition elicits an immune response in the individual against the cancer and wherein the cancer in the individual is reduced. In some embodiments, the biological sample is selected from the group consisting of blood, plasma, serum, thymus, bone marrow, spleen, lymph node, bronchoalveolar lavage, breast, central nervous system, cerebrospinal fluid, eye, tears, gastrointestinal tract, saliva, feces, urine, heart, kidney, liver, lung, muscle, pancreas, peripheral nervous system, saliva, skin, thyroid, trachea, and tumor. In some embodiments, the biological sample comprises cells selected from B cells, T cells, CD4+ T cells, CD8+ T cells, Th17 cells, and combinations thereof. In some embodiments, the biological sample comprises an antibody.

[0092] Also provided herein, in some aspects, are methods of reducing risk of reoccurrence of cancer in an individual, the methods comprising, a) obtaining a biological sample from the individual; b) determining immunoreactivity of the biological sample to a first population of peptides; c) preparing a vaccine composition comprising a second population of peptides that have immunoreactivity with the biological sample from the individual, wherein the second population of peptides is a sub-population of the first population; and d) administering the vaccine composition to the individual, wherein administering the vaccine composition elicits an immune response in the individual against the cancer and wherein the risk of developing cancer again in the individual is reduced compared to an individual who did not receive the vaccine.

[0093] Methods herein comprise administration of one or more polypeptides reactive to immune cells and antibodies, for example in a biological sample from an individual with cancer. In some embodiments, immunoreactivity comprises antibody reactivity. In some embodiments, immunoreactivity comprises a T cell response. A T cell response herein includes but is not limited to one or more of proliferation assay, 3H-thymidine assay, BrdU assay, CFSE assay, cytokine secretion assay, ELISPOT assay, intracellular staining assay, quantitative rtPCR assay, cytometric bead array assay, cytotoxicity assay, 51-chromium assay, degranulation assay, granulysin assay, granzyme A assay, granzyme B assay, and perforin assay. Methods herein, in some embodiments, screen a first population for peptides binding to antibodies or eliciting a T cell reaction in a biological sample from an individual, wherein the first population of peptides comprises peptides encoded by a frameshifted mRNA expressed by a cancer cell. In some embodiments, the first population of peptides comprises peptides having a sequence selected from SEQ ID NO: 1-7264. In some embodiments, each of the first population of peptides binds to at least one MHC subtype. In some embodiments, a portion of the first population of peptides binds to more than one MHC subtype. In some embodiments, each of the first population of peptides binds to at least on HLA subtype. In some embodiments, each of the first population of peptides comprises at least one T cell epitope. In some embodiments, at least one of the first population of peptides comprises at least one T cell epitope. In some embodiments, each of the first population of peptides comprises at least on B cell epitope. In some embodiments, at least one of the first population of peptides comprises at least on B cell epitope. In some embodiments, first population of peptides is bound to a substrate.

[0094] Methods herein comprise administration of a vaccine composition to an individual. Vaccine compositions herein, in some embodiments, comprise a pharmaceutically acceptable adjuvant or excipient. In some embodiments, the adjuvant is selected from the group consisting of ABM2, AS01B, AS02, AS02A, Adjumer, Adjuvax, Algammulin, Alum, Aluminum phosphate, Aluminum potassium sulfate, Bordetella pertussis, Calcitriol, Chitosan, Cholera toxin, CpG, Dibutyl phthalate, Dimethyldioctadecylammonium bromide (DDA), Freund's adjuvant, Freund's complete, Freund's incomplete (IFA), GM-CSF, GMDP, Gamma Inulin, Glycerol, HBSS (Hank's Balanced Salt Solution), IL-12, IL-2, Imiquimod, Interferon-Gamma, ISCOM, Lipid Core Peptide (LCP), Lipofectin, Lipopolysaccharide (LPS), Liposomes, MF59, MLP+TDM, Monophosphoryl lipid A, Montanide IMS-1313, Montanide ISA 206, Montanide ISA 720, Montanide ISA-51, Montanide ISA-50, nor-MDP, Oil-in-water emulsion, P1005 (non-ionic copolymer), Pam3Cys (lipoprotein), Pertussis toxin, Poloxamer, QS21, RaLPS, Ribi, Saponin, Seppic ISA 720, Soybean Oil, Squalene, Syntex Adjuvant Formulation (SAF), Synthetic polynucleotides (poly IC/poly AU), TiterMax Tomatine, Vaxfectin, XtendIII, and Zymosan. Vaccine compositions herein, in some embodiments, are administered via a route selected from the group consisting of subcutaneous, intradermal, intramuscular, intranasal, intravenous, and sublingual. Individuals in need of administration of a personalized vaccine, in some embodiments are mammals. In some embodiments, the individual is a human, a cat, a mouse, a rat, a rabbit, a horse, a cow, or a pig.

[0095] Methods herein comprise administration of a personalized vaccine in an individual with cancer. In some embodiments, the cancer comprises Acanthoma, Acinic cell carcinoma, Acoustic neuroma, Acral lentiginous melanoma, Acrospiroma, Acute eosinophilic leukemia, Acute lymphoblastic leukemia, Acute megakaryoblastic leukemia, Acute monocytic leukemia, Acute myeloblastic leukemia with maturation, Acute myeloid dendritic cell leukemia, Acute myeloid leukemia, Acute promyelocytic leukemia, Adamantinoma, Adenocarcinoma, Adenoid cystic carcinoma, Adenoma, Adenomatoid odontogenic tumor, Adrenocortical carcinoma, Adult T-cell leukemia, Aggressive NK-cell leukemia, AIDS-Related Cancers, AIDS-related lymphoma, Alveolar soft part sarcoma, Ameloblastic fibroma, Anal cancer, Anaplastic large cell lymphoma, Anaplastic thyroid cancer, Angioimmunoblastic T-cell lymphoma, Angiomyolipoma, Angiosarcoma, Appendix cancer, Astrocytoma, Atypical teratoid rhabdoid tumor, Basal cell carcinoma, Basal-like carcinoma, B-cell leukemia, B-cell lymphoma, Bellini duct carcinoma, Biliary tract cancer, Bladder cancer, Blastoma, Bone Cancer, Bone tumor, Brain Stem Glioma, Brain Tumor, Breast Cancer, Brenner tumor, Bronchial Tumor, Bronchioloalveolar carcinoma, Brown tumor, Burkitt's lymphoma, Cancer of Unknown Primary Site, Carcinoid Tumor, Carcinoma, Carcinoma in situ, Carcinoma of the penis, Carcinoma of Unknown Primary Site, Carcinosarcoma, Castleman's Disease, Central Nervous System Embryonal Tumor, Cerebellar Astrocytoma, Cerebral Astrocytoma, Cervical Cancer, Cholangiocarcinoma, Chondroma, Chondrosarcoma, Chordoma, Choriocarcinoma, Choroid plexus papilloma, Chronic Lymphocytic Leukemia, Chronic monocytic leukemia, Chronic myelogenous leukemia, Chronic Myeloproliferative Disorder, Chronic neutrophilic leukemia, Clear-cell tumor, Colon Cancer, Colorectal cancer, Craniopharyngioma, Cutaneous T-cell lymphoma, Degos disease, Dermatofibrosarcoma protuberans, Dermoid cyst, Desmoplastic small round cell tumor, Diffuse large B cell lymphoma, Dysembryoplastic neuroepithelial tumor, Embryonal carcinoma, Endodermal sinus tumor, Endometrial cancer, Endometrial Uterine Cancer, Endometrioid tumor, Enteropathy-associated T-cell lymphoma, Ependymoblastoma, Ependymoma, Epithelioid sarcoma, Erythroleukemia, Esophageal cancer, Esthesioneuroblastoma, Ewing Family of Tumor, Ewing Family Sarcoma, Ewing's sarcoma, Extracranial Germ Cell Tumor, Extragonadal Germ Cell Tumor, Extrahepatic Bile Duct Cancer, Extramammary Paget's disease, Fallopian tube cancer, Fetus in fetu, Fibroma, Fibrosarcoma, Follicular lymphoma, Follicular thyroid cancer, Gallbladder Cancer, Gallbladder cancer, Ganglioglioma, Ganglioneuroma, Gastric Cancer, Gastric lymphoma, Gastrointestinal cancer, Gastrointestinal Carcinoid Tumor, Gastrointestinal Stromal Tumor, Gastrointestinal stromal tumor, Germ cell tumor, Germinoma, Gestational choriocarcinoma, Gestational Trophoblastic Tumor, Giant cell tumor of bone, Glioblastoma multiforme, Glioma, Gliomatosis cerebri, Glomus tumor, Glucagonoma, Gonadoblastoma, Granulosa cell tumor, Hairy Cell Leukemia, Hairy cell leukemia, Head and Neck Cancer, Head and neck cancer, Heart cancer, Hemangioblastoma, Hemangiopericytoma, Hemangiosarcoma, Hematological malignancy, Hepatocellular carcinoma, Hepatosplenic T-cell lymphoma, Hereditary breast-ovarian cancer syndrome, Hodgkin Lymphoma, Hodgkin's lymphoma, Hypopharyngeal Cancer, Hypothalamic Glioma, Inflammatory breast cancer, Intraocular Melanoma, Islet cell carcinoma, Islet Cell Tumor, Juvenile myelomonocytic leukemia, Kaposi Sarcoma, Kaposi's sarcoma, Kidney Cancer, Klatskin tumor, Krukenberg tumor, Laryngeal Cancer, Laryngeal cancer, Lentigo maligna melanoma, Leukemia, Lip and Oral Cavity Cancer, Liposarcoma, Lung cancer, Luteoma, Lymphangioma, Lymphangiosarcoma, Lymphoepithelioma, Lymphoid leukemia, Lymphoma, Macroglobulinemia, Malignant Fibrous Histiocytoma, Malignant fibrous histiocytoma, Malignant Fibrous Histiocytoma of Bone, Malignant Glioma, Malignant Mesothelioma, Malignant peripheral nerve sheath tumor, Malignant rhabdoid tumor, Malignant triton tumor, MALT lymphoma, Mantle cell lymphoma, Mast cell leukemia, Mediastinal germ cell tumor, Mediastinal tumor, Medullary thyroid cancer, Medulloblastoma, Medulloepithelioma, Melanoma, Meningioma, Merkel Cell Carcinoma, Mesothelioma, Metastatic Squamous Neck Cancer with Occult Primary, Metastatic urothelial carcinoma, Mixed Mullerian tumor, Monocytic leukemia, Mouth Cancer, Mucinous tumor, Multiple Endocrine Neoplasia Syndrome, Multiple myeloma, Mycosis Fungoides, Myelodysplastic Disease, Myelodysplastic Syndromes, Myeloid leukemia, Myeloid sarcoma, Myeloproliferative Disease, Myxoma, Nasal Cavity Cancer, Nasopharyngeal Cancer, Nasopharyngeal carcinoma, Neoplasm, Neurinoma, Neuroblastoma, Neurofibroma, Neuroma, Nodular melanoma, Non-Hodgkin lymphoma, Nonmelanoma Skin Cancer, Non-Small Cell Lung Cancer, Ocular oncology, Oligoastrocytoma, Oligodendroglioma, Oncocytoma, Optic nerve sheath meningioma, Oral cancer, Oropharyngeal Cancer, Osteosarcoma, Ovarian cancer, Ovarian Epithelial Cancer, Ovarian Germ Cell Tumor, Ovarian Low Malignant Potential Tumor, Paget's disease of the breast, Pancoast tumor, Pancreatic cancer, Papillary thyroid cancer, Papillomatosis, Paraganglioma, Paranasal Sinus Cancer, Parathyroid Cancer, Penile Cancer, Perivascular epithelioid cell tumor, Pharyngeal Cancer, Pheochromocytoma, Pineal Parenchymal Tumor of Intermediate Differentiation, Pineoblastoma, Pituicytoma, Pituitary adenoma, Pituitary tumor, Plasma Cell Neoplasm, Pleuropulmonary blastoma, Polyembryoma, Precursor T-lymphoblastic lymphoma, Primary central nervous system lymphoma, Primary effusion lymphoma, Primary Hepatocellular Cancer, Primary Liver Cancer, Primary peritoneal cancer, Primitive neuroectodermal tumor, Prostate cancer, Pseudomyxoma peritonei, Rectal Cancer, Renal cell carcinoma, Respiratory Tract Carcinoma Involving the NUT Gene on Chromosome 15, Retinoblastoma, Rhabdomyoma, Rhabdomyosarcoma, Richter's transformation, Sacrococcygeal teratoma, Salivary Gland Cancer, Sarcoma, Schwannomatosis, Sebaceous gland carcinoma, Secondary neoplasm, Seminoma, Serous tumor, Sertoli-Leydig cell tumor, Sex cord-stromal tumor, Sezary Syndrome, Signet ring cell carcinoma, Skin Cancer, Small blue round cell tumor, Small cell carcinoma, Small Cell Lung Cancer, Small cell lymphoma, Small intestine cancer, Soft tissue sarcoma, Somatostatinoma, Soot wart, Spinal Cord Tumor, Spinal tumor, Splenic marginal zone lymphoma, Squamous cell carcinoma, Stomach cancer, Superficial spreading melanoma, Supratentorial Primitive Neuroectodermal Tumor, Surface epithelial-stromal tumor, Synovial sarcoma, T-cell acute lymphoblastic leukemia, T-cell large granular lymphocyte leukemia, T-cell leukemia, T-cell lymphoma, T-cell prolymphocytic leukemia, Teratoma, Terminal lymphatic cancer, Testicular cancer, Thecoma, Throat Cancer, Thymic Carcinoma, Thymoma, Thyroid cancer, Transitional Cell Cancer of Renal Pelvis and Ureter, Transitional cell carcinoma, Urachal cancer, Urethral cancer, Urogenital neoplasm, Uterine sarcoma, Uveal melanoma, Vaginal Cancer, Verner Morrison syndrome, Verrucous carcinoma, Visual Pathway Glioma, Vulvar Cancer, Waldenstrom's macroglobulinemia, Warthin's tumor, or Wilms' tumor.

[0096] Provided herein, in some aspects, are methods of monitoring treatment of an individual receiving a personalized cancer vaccine. Some such methods comprise, a) obtaining a biological sample from the individual; b) determining immunoreactivity of the biological sample to a first population of peptides; c) comparing immunoreactivity of the biological sample to a previous immunoreactivity in the individual, wherein successful treatment is indicated by reduced immunoreactivity to the first population of peptides. In some embodiments, the biological sample is selected from the group consisting of blood, plasma, serum, thymus, bone marrow, spleen, lymph node, bronchoalveolar lavage, breast, central nervous system, cerebrospinal fluid, eye, tears, gastrointestinal tract, saliva, feces, urine, heart, kidney, liver, lung, muscle, pancreas, peripheral nervous system, saliva, skin, thyroid, trachea, and tumor. In some embodiments, the biological sample comprises cells selected from B cells, T cells, CD4+ T cells, CD8+ T cells, Th17 cells, and combinations thereof. In some embodiments, the biological sample comprises an antibody.

### Methods of Diagnosing Cancer

[0097] Provided herein, in some aspects, are methods of determining whether an individual has cancer. Some such methods comprise, a) obtaining a biological sample from the individual and b) determining immunoreactivity of the biological sample to a first population of peptides, wherein the individual is determined to have cancer if the sample from the individual is immunoreactive with one or more of the peptides. In some embodiments, the method further comprises treating the individual using a method comprising, a) preparing a vaccine composition comprising a second population of peptides that have immunoreactivity with the biological sample from the individual, wherein the second population of peptides is a sub-population of the first population and b) administering the vaccine composition to the individual, wherein administering the vaccine composition elicits an immune response in the individual against the cancer and wherein the cancer in the individual is reduced. In some embodiments, the biological sample is selected from the group consisting of blood, plasma, serum, thymus, bone marrow, spleen, lymph node, bronchoalveolar lavage, breast, central nervous system, cerebrospinal fluid, eye, tears, gastrointestinal tract, saliva, feces, urine, heart, kidney, liver, lung, muscle, pancreas, peripheral nervous system, saliva, skin, thyroid, trachea, and tumor. In some embodiments, the biological sample comprises cells selected from B cells, T cells, CD4+ T cells, CD8+ T cells, Th17 cells, and combinations thereof. In some embodiments, the biological sample comprises an antibody.

[0098] Methods herein comprise determining whether an individual has cancer by determining whether one or more polypeptides reactive to immune cells and antibodies, for example in a biological sample from the individual. In some embodiments, immunoreactivity comprises antibody reactivity. In some embodiments, immunoreactivity comprises a T cell response. A T cell response herein includes but is not limited to one or more of proliferation assay, 3H-thymidine assay, BrdU assay, CFSE assay, cytokine secretion assay, ELISPOT assay, intracellular staining assay, quantitative rtPCR assay, cytometric bead array assay, cytotoxicity assay, 51-chromium assay, degranulation assay, granulysin assay, granzyme A assay, granzyme B assay, and perforin assay. Methods herein, in some embodiments, screen a first population for peptides binding to antibodies or eliciting a T cell reaction in a biological sample from an individual, wherein the first population of peptides comprises peptides encoded by a frameshifted mRNA expressed by a cancer cell. In some embodiments, the first population of peptides comprises peptides having a sequence selected from SEQ ID NO: 1-7264. In some embodiments, each of the first population of peptides binds to at least one MHC subtype. In some embodiments, a portion of the first population of peptides binds to more than one MHC subtype. In some embodiments, each of the first population of peptides binds to at least on HLA subtype. In some embodiments, each of the first population of peptides comprises at least one T cell epitope. In some embodiments, at least one of the first population of peptides comprises at least one T cell epitope. In some embodiments, each of the first population of peptides comprises at least on B cell epitope. In some embodiments, at least one of the first population of peptides comprises at least on B cell epitope. In some embodiments, first population of peptides is bound to a substrate.

[0099] Methods herein comprise determining whether an individual has cancer. In some embodiments, the cancer comprises Acanthoma, Acinic cell carcinoma, Acoustic neuroma, Acral lentiginous melanoma, Acrospiroma, Acute eosinophilic leukemia, Acute lymphoblastic leukemia, Acute megakaryoblastic leukemia, Acute monocytic leukemia, Acute myeloblastic leukemia with maturation, Acute myeloid dendritic cell leukemia, Acute myeloid leukemia, Acute promyelocytic leukemia, Adamantinoma, Adenocarcinoma, Adenoid cystic carcinoma, Adenoma, Adenomatoid odontogenic tumor, Adrenocortical carcinoma, Adult T-cell leukemia, Aggressive NK-cell leukemia, AIDS-Related Cancers, AIDS-related lymphoma, Alveolar soft part sarcoma, Ameloblastic fibroma, Anal cancer, Anaplastic large cell lymphoma, Anaplastic thyroid cancer, Angioimmunoblastic T-cell lymphoma, Angiomyolipoma, Angiosarcoma, Appendix cancer, Astrocytoma, Atypical teratoid rhabdoid tumor, Basal cell carcinoma, Basal-like carcinoma, B-cell leukemia, B-cell lymphoma, Bellini duct carcinoma, Biliary tract cancer, Bladder cancer, Blastoma, Bone Cancer, Bone tumor, Brain Stem Glioma, Brain Tumor, Breast Cancer, Brenner tumor, Bronchial Tumor, Bronchioloalveolar carcinoma, Brown tumor, Burkitt's lymphoma, Cancer of Unknown Primary Site, Carcinoid Tumor, Carcinoma, Carcinoma in situ, Carcinoma of the penis, Carcinoma of Unknown Primary Site, Carcinosarcoma, Castleman's Disease, Central Nervous System Embryonal Tumor, Cerebellar Astrocytoma, Cerebral Astrocytoma, Cervical Cancer, Cholangiocarcinoma, Chondroma, Chondrosarcoma, Chordoma, Choriocarcinoma, Choroid plexus papilloma, Chronic Lymphocytic Leukemia, Chronic monocytic leukemia, Chronic myelogenous leukemia, Chronic Myeloproliferative Disorder, Chronic neutrophilic leukemia, Clear-cell tumor, Colon Cancer, Colorectal cancer, Craniopharyngioma, Cutaneous T-cell lymphoma, Degos disease, Dermatofibrosarcoma protuberans, Dermoid cyst, Desmoplastic small round cell tumor, Diffuse large B cell lymphoma, Dysembryoplastic neuroepithelial tumor, Embryonal carcinoma, Endodermal sinus tumor, Endometrial cancer, Endometrial Uterine Cancer, Endometrioid tumor, Enteropathy-associated T-cell lymphoma, Ependymoblastoma, Ependymoma, Epithelioid sarcoma, Erythroleukemia, Esophageal cancer, Esthesioneuroblastoma, Ewing Family of Tumor, Ewing Family Sarcoma, Ewing's sarcoma, Extracranial Germ Cell Tumor, Extragonadal Germ Cell Tumor, Extrahepatic Bile Duct Cancer, Extramammary Paget's disease, Fallopian tube cancer, Fetus in fetu, Fibroma, Fibrosarcoma, Follicular lymphoma, Follicular thyroid cancer, Gallbladder Cancer, Gallbladder cancer, Ganglioglioma, Ganglioneuroma, Gastric Cancer, Gastric lymphoma, Gastrointestinal cancer, Gastrointestinal Carcinoid Tumor, Gastrointestinal Stromal Tumor, Gastrointestinal stromal tumor, Germ cell tumor, Germinoma, Gestational choriocarcinoma, Gestational Trophoblastic Tumor, Giant cell tumor of bone, Glioblastoma multiforme, Glioma, Gliomatosis cerebri, Glomus tumor, Glucagonoma, Gonadoblastoma, Granulosa cell tumor, Hairy Cell Leukemia, Hairy cell leukemia, Head and Neck Cancer, Head and neck cancer, Heart cancer, Hemangioblastoma, Hemangiopericytoma, Hemangiosarcoma, Hematological malignancy, Hepatocellular carcinoma, Hepatosplenic T-cell lymphoma, Hereditary breast-ovarian cancer syndrome, Hodgkin Lymphoma, Hodgkin's lymphoma, Hypopharyngeal Cancer, Hypothalamic Glioma, Inflammatory breast cancer, Intraocular Melanoma, Islet cell carcinoma, Islet Cell Tumor, Juvenile myelomonocytic leukemia, Kaposi Sarcoma, Kaposi's sarcoma, Kidney Cancer, Klatskin tumor, Krukenberg tumor, Laryngeal Cancer, Laryngeal cancer, Lentigo maligna melanoma, Leukemia, Lip and Oral Cavity Cancer, Liposarcoma, Lung cancer, Luteoma, Lymphangioma, Lymphangiosarcoma, Lymphoepithelioma, Lymphoid leukemia, Lymphoma, Macroglobulinemia, Malignant Fibrous Histiocytoma, Malignant fibrous histiocytoma, Malignant Fibrous Histiocytoma of Bone, Malignant Glioma, Malignant Mesothelioma, Malignant peripheral nerve sheath tumor, Malignant rhabdoid tumor, Malignant triton tumor, MALT lymphoma, Mantle cell lymphoma, Mast cell leukemia, Mediastinal germ cell tumor, Mediastinal tumor, Medullary thyroid cancer, Medulloblastoma, Medulloepithelioma, Melanoma, Meningioma, Merkel Cell Carcinoma, Mesothelioma, Metastatic Squamous Neck Cancer with Occult Primary, Metastatic urothelial carcinoma, Mixed Mullerian tumor, Monocytic leukemia, Mouth Cancer, Mucinous tumor, Multiple Endocrine Neoplasia Syndrome, Multiple myeloma, Mycosis Fungoides, Myelodysplastic Disease, Myelodysplastic Syndromes, Myeloid leukemia, Myeloid sarcoma, Myeloproliferative Disease, Myxoma, Nasal Cavity Cancer, Nasopharyngeal Cancer, Nasopharyngeal carcinoma, Neoplasm, Neurinoma, Neuroblastoma, Neurofibroma, Neuroma, Nodular melanoma, Non-Hodgkin lymphoma, Nonmelanoma Skin Cancer, Non-Small Cell Lung Cancer, Ocular oncology, Oligoastrocytoma, Oligodendroglioma, Oncocytoma, Optic nerve sheath meningioma, Oral cancer, Oropharyngeal Cancer, Osteosarcoma, Ovarian cancer, Ovarian Epithelial Cancer, Ovarian Germ Cell Tumor, Ovarian Low Malignant Potential Tumor, Paget's disease of the breast, Pancoast tumor, Pancreatic cancer, Papillary thyroid cancer, Papillomatosis, Paraganglioma, Paranasal Sinus Cancer, Parathyroid Cancer, Penile Cancer, Perivascular epithelioid cell tumor, Pharyngeal Cancer, Pheochromocytoma, Pineal Parenchymal Tumor of Intermediate Differentiation, Pineoblastoma, Pituicytoma, Pituitary adenoma, Pituitary tumor, Plasma Cell Neoplasm, Pleuropulmonary blastoma, Polyembryoma, Precursor T-lymphoblastic lymphoma, Primary central nervous system lymphoma, Primary effusion lymphoma, Primary Hepatocellular Cancer, Primary Liver Cancer, Primary peritoneal cancer, Primitive neuroectodermal tumor, Prostate cancer, Pseudomyxoma peritonei, Rectal Cancer, Renal cell carcinoma, Respiratory Tract Carcinoma Involving the NUT Gene on Chromosome 15, Retinoblastoma, Rhabdomyoma, Rhabdomyosarcoma, Richter's transformation, Sacrococcygeal teratoma, Salivary Gland Cancer, Sarcoma, Schwannomatosis, Sebaceous gland carcinoma, Secondary neoplasm, Seminoma, Serous tumor, Sertoli-Leydig cell tumor, Sex cord-stromal tumor, Sezary Syndrome, Signet ring cell carcinoma, Skin Cancer, Small blue round cell tumor, Small cell carcinoma, Small Cell Lung Cancer, Small cell lymphoma, Small intestine cancer, Soft tissue sarcoma, Somatostatinoma, Soot wart, Spinal Cord Tumor, Spinal tumor, Splenic marginal zone lymphoma, Squamous cell carcinoma, Stomach cancer, Superficial spreading melanoma, Supratentorial Primitive Neuroectodermal Tumor, Surface epithelial-stromal tumor, Synovial sarcoma, T-cell acute lymphoblastic leukemia, T-cell large granular lymphocyte leukemia, T-cell leukemia, T-cell lymphoma, T-cell prolymphocytic leukemia, Teratoma, Terminal lymphatic cancer, Testicular cancer, Thecoma, Throat Cancer, Thymic Carcinoma, Thymoma, Thyroid cancer, Transitional Cell Cancer of Renal Pelvis and Ureter, Transitional cell carcinoma, Urachal cancer, Urethral cancer, Urogenital neoplasm, Uterine sarcoma, Uveal melanoma, Vaginal Cancer, Verner Morrison syndrome, Verrucous carcinoma, Visual Pathway Glioma, Vulvar Cancer, Waldenstrom's macroglobulinemia, Warthin's tumor, or Wilms'

[0100] The following peptides are for use in personalized cancer vaccines for humans.

CCDS43382.1, Del, A_10,
(SEQIDNO: 1)
RKRMKTGAIQEKGAIQEKGAMTKRICVVNFEACREMESLSAPEKITLFEA
HMARCTSINVLCVRASLIEKLMKEKRKMKRNQVASPQIMQRMSAVNFET
I,;
CCDS34380.1, Del, A_10,
(SEQIDNO: 4)
SEIPEKAGGRRMWMMMEKRKSSWSVLRSSQCQPVMRRMKYPPQNPAEGRK
PRVVMFLQP,;
CCDS43478.1, Del, A_10,
(SEQIDNO: 6)
RKRKREKRSQKSRQNHLQLKSCRRKISNWSLKKVPALKKLRSPLWIF,;
CCDS42127.1, Del, A_10,
(SEQIDNO: 7)
KSTRREMPSQATPSPPGPWRAALGKEVKRSQSKLRLRNTSP,;
CCDS43314.1, Ins, A_10,
(SEQIDNO: 8)
KTSDFPMCWLRQSDSRSVYSEGFSGFGMACGMFEMCGV,;
CCDS53862.1, Ins, A_10,
(SEQIDNO: 9)
KKFIYIHCVDRGLLFPETWGFEQNNTWRQYNETSFL,;
CCDS2648.1, Del, A_10,
(SEQIDNO: 10)
SLVRLSSCVPVALMSAMTTSSSQKNITPAILTCC,;
CCDS33304.1, Ins, A_10,
(SEQIDNO: 11)
KNKKILGQEKTEVARNGNERSSASRRTEEINR,;
CCDS4156.1, Ins, A_10,
(SEQIDNO: 12)
KVWRRKTESKPIPRLPARVSWCNEHRVDNRKL,;
CCDS33641.1, Del, A_10,
(SEQIDNO: 13)
RKKKRRTKREREEKSQKRRTCRPTRCSVKSIA,;
CCDS791.2, Ins, A_10,
(SEQIDNO: 14)
KTSGFHDLQLRPCNTLTPFLLLQDFWKQILM,;
CCDS33641.1, Ins, A_10,
(SEQIDNO: 15)
KEKRREGQRERERRKAKKEEHVGLPGVL,;
CCDS53731.1, Ins, A_10,
(SEQIDNO: 16)
KAGREQSQTAGRTIQCFPDRNQAAPFC,;
CCDS5061.1, Del,; A_10,
(SEQIDNO: 17)
NLHLCYYHSQSNRNKSRQMESLGMKLQ,;
CCDS13627.1, Ins, A_10,
(SEQIDNO: 18)
KGQSGCLNIWNRIEPASTYRQYSGTK,;
CCDS44611.1, Del, A_10,
(SEQIDNO: 19)
KHYNRKISIKKLNRMKVPLMKLITRV,;
CCDS8328.2, Del, A_10,
(SEQIDNO: 20)
KQLRCWNTWAKMFFMVFLIIWQNTMF,;
CCDS46894.1, Del, A_10,
(SEQIDNO: 21)
ITHPFASQPLGQEMPNNTQIRLLKP,;
CCDS45025.1, Del, A_10,
(SEQIDNO: 22)
KLKLAPLQVTTTLKLILVMLEIVTE,;
CCDS5061.1, Ins, A_10,
(SEQIDNO: 23)
KTYTCAITTVKATETKAGKWSRWE,;
CCDS42127.1, Ins, A_10,
(SEQIDNO: 24)
KNPPGGRCPPRPLQALQVHGEQP,;
CCDS44720.1, Del, A_10,
(SEQIDNO: 25)
KGVRILKLCSKVSFRVDWITS,;
CCDS46894.1, Ins, A_10,
(SEQIDNO: 26)
KLLIHLPPSHWDRKCQTTPR,;
CCDS55858.1, Ins, A_10,
(SEQIDNO: 27)
KNSSNGSRKRKKKCNFRINH,;
CCDS41816.1, Del, A_10,
(SEQIDNO: 28)
IRHTDTQQDLQVSCGFLQN,;
CCDS43478.1, Ins, A_10,
(SEQIDNO: 29)
KGREKERKGARKAGKTTYS,;
CCDS55405.1, Del, A_10,
(SEQIDNO: 30)
MYYPPKTLKGCANPPDYL,;
CCDS55858.1, Del, A_10,
(SEQIDNO: 31)
KFVKWLKKEEKEVQLQD,;
CCDS9638.1, Del, A_10,
(SEQIDNO: 32)
KLKDCISTKPISGIVP,;
CCDS7253.1, Ins, A_10,
(SEQIDNO: 33)
KRVNTAWKTKKTSFSL,;
CCDS43071.1, Del, A_10,
(SEQIDNO: 34)
RTLESAGLFPWLHTQC,;
CCDS43122.1, Ins, A_10,
(SEQIDNO: 35)
KIFKIFIYEGKSEKS,
CCDS59217.1, Ins, A_10,
(SEQIDNO: 36)
KRKAEDCKGKLEKSV,
CCDS34380.1, Ins, A_10,
(SEQIDNO: 37)
KARYPKRQAEEGCG,;
CCDS2346.1, Ins, A_10,
(SEQIDNO: 38)
KDDQKIRNGVRRRR,;
CCDS3058.1, Ins, A_10,
(SEQIDNO: 39)
KRKIIEFRIKFLF,;
CCDS41816.1, Ins, A_10,
(SEQIDNO: 40)
KSGTQTLSRIFK,;
CCDS41293.1, Del, A_10,
(SEQIDNO: 41)
KVVINLKRLQKF,;
CCDS34171.1, Ins, A_10,
(SEQIDNO: 42)
KKEKVLLIQFH,;
CCDS11906.1, Ins, A_10,
(SEQIDNO: 43)
KNGGNGPTQKS,;
CCDS53731.1, Del, A_10,
(SEQIDNO: 44)
SRKRAVSNSR,;
CCDS717.2, Del, A_10,
(SEQIDNO: 45)
KPRDICRIS,;
CCDS44611.1, Ins, A_10,
(SEQIDNO: 46)
KSITTERYP,;
CCDS53862.1, Del, A_10,
(SEQIDNO: 47)
KVYLHPLCG,;
CCDS55405.1, Ins, A_10,
(SEQIDNO: 48)
KCITHQRH,;
CCDS3190.1, Ins, A_10,
(SEQIDNO: 49)
KKFPNGSL,;
CCDS10158.1, Del, A_10,
(SEQIDNO: 51)
SRKLMSSC,;
CCDS4156.1, Del, A_10,
(SEQIDNO: 52)
SVEKKDGE,;
CCDS31683.1, Ins, A_11,
(SEQIDNO: 53)
KKGKERQEGQRPPQKFAGLGFLISPSSCSSWGPGSFTRSCGYPTLCSSWI
SKREPGELSGVWTSAWRTHAAFTGSQDLCLYKGSLGLHI,;
CCDS8043.1, Del, A_11,
(SEQIDNO: 54)
NLLCVKCSTCPTYVKGSPSCPLRDLQTLWPILALISMSSIWGTMFSCCRL
SLVQSSSWPTVLHLGH,;
CCDS56392.1, Ins, A_11,
(SEQIDNO: 55)
KKEKKKQHGCKGETGGSVKCGPEGAKHHAVGCPVQMGCQLLFPADPKK,;
CCDS56391.1, Ins, A_11,
(SEQIDNO: 56)
KKQHGCKGETGGSVKCGPEGAKHHAVGCPVQMGCQLLFPADPKK,;
CCDS33527.2, Del, A_11,
(SEQIDNO: 58)
KMVRLDLLMRYLKAIKRMKNVYLQKERRLKAGN,;
CCDS5101.1, Ins, A_11,
(SEQIDNO: 59)
KKEALFLQEVFQAERLLLQEEQEGGWRRR,;
CCDS33143.1, Del, A_11,
(SEQIDNO: 60)
KTILKKAGIGMCVKVSSIFFINKQKP,;
CCDS43133.1, Del, A_11,
(SEQIDNO: 61)
KTLRNHLFLIRWIILTFLQKILK,;
CCDS9684.1, Del, A_11,
(SEQIDNO: 62)
NCSIPTYVKKRKTTNHSSQMTVH,;
CCDS31683.1, Del, A_11,
(SEQIDNO: 63)
KRKRKTRRTETPPKVRWPWVPH,;
CCDS56392.1, Del, A_11,
(SEQIDNO: 64)
KRKKKTTWLQRRNWRQC,;
CCDS46478.1, Del, A_11,
(SEQIDNO: 65)
KKSWRLLLHSSNLI,;
CCDS10374.2, Ins, A_11,
(SEQIDNO: 66)
KILLNLSCQSCTF,;
CCDS46478.1, Ins, A_11,
(SEQIDNO: 67)
KRRVGDCYFTAQI,;
CCDS56391.1, Del, A_11,
(SEQIDNO: 68)
KTTWLQRRNWRQC,;
CCDS3068.1, Ins, A_11,
(SEQIDNO: 70)
KKAEETEYQLF,;
CCDS43133.1, Ins, A_11,
(SEQIDNO: 71)
KKPSEIISF,;
CCDS9684.1, Ins, A_11,
(SEQIDNO: 72)
KIAAYLPM,;
CCDS781.1, Del, A_12,;
(SEQIDNO: 73)
KGLMTLSKMIKKKKNLVI,;
CCDS35085.1, Del, A_7,
(SEQIDNO: 74)
MQTKVMNRRMPRKMQRRLKKVRKIRRSPVVQTVTQRMMSRKSLRRTPRKM
PRKLPRKILRKNLLIQRRMQRKMLRRMQRRMQRRMQRRMKRRMQRRRA
S,;
CCDS13900.2, Ins, A_7,
(SEQIDNO: 76)
TELLQPHAYHAEALHDPVYTGPERVTVSSLHSRQGLLFSALLGGQSPIHL
EPAWSFCLLLRNLFSSFPSLQAATKSGHHKQPHHVTICASSRHGSYI,;
CCDS9460.1, Del, A_7,
(SEQIDNO: 77)
GHVVIKNMTNTVWRMKRNLIICHHLSLVFQDVPLSKEEFPIHRLSPAFGS
VGGAPVPSIFLQIITSSNSIIHLKPKLQISNQIGPMEISSEEVCLT,;
CCDS41355.1, Del, A_7,
(SEQIDNO: 79)
KMNMDHQANCLSMSGLTSGGECLMSTMKISLSTVLSQKKSKQQGVPQVSL
VEIEFISVKEAAVLVEHAELILQQNCMEKIVNSFLIKYKQKKHP,;
CCDS31477.1, Ins, A_7,
(SEQIDNO: 80)
MAREKRGPGVCRSTNKKPQTGSWRLCRFSKSIKEGCWKGHQCHVGGFGSK
MSYWPGCWAKEEIWTICRTCCANHLGEIQREETSSGTSPAGGN,;
CCDS590.1, Del, A_7,
(SEQIDNO: 81)
SRWENRLGFCTRGGVYFGTFTVQLLKGETLVNIQVKQKPFMIIVQQLPRA
PCLATFPPTMGCREAPSRQVSFRVLRGHSPRRTHSLHLTILAA,;
CCDS46430.1, Del, A_7,
(SEQIDNO: 82)
DSDQSLVLLQNILLVQSLREVIKSQKSIRRKVRRGDINLTLQNPMLSERR
IKKKKIGKVKKTELDKDQNQNTNRLRKRLERILVIGILLAAN,;
CCDS4643.1, Del, A_7,
(SEQIDNO: 84)
TNMENLSRAQNLLNMQQFSVEIKLISVMNVGKLSGTAQNLLGIRESTLER
DAMNVMNVGKALQRAQILLDIGEFTLGKDPLVAKNVGEHST,;
CCDS43027.1, Del, A_7,
(SEQIDNO: 85)
GDTIFSPSVLSMSQSQLIKSTRSSAETTAPKHFLAQRTLKNLTWRELAIT
VWPQANGLCQWTICQGEKSVWQPWLSCLLCTVFVLPHSLF,;
CCDS43226.1, Del, A_7,
(SEQIDNO: 86)
KRKKKRRASQMIKTKIKTTQRRKRRKRTKRRKRKRRKAKIRKKRRRKKLW
LLIPRETHITTGCFASHYLLCTTGQWLLPEHVLMNFNLIT,;
CCDS10425.1, Ins, A_7,
(SEQIDNO: 87)
NRGALRLRHRLLKALQPPGEPARVCAAIPRTGRLQTGAAPAGLCLPRLDL
LCREDSRQLHPPPHQHRPVPAAGHGLPGQGLLRPAAALDP,;
CCDS34353.1, Del, A_7,
(SEQIDNO: 90)
ERISRLKESIGNILIVTVTQSLTQILTLMMIKRELKPRRKRRKRNTKQRK
RRIRKPKKNPVTQAVKTQKRTCQKLPGWSSQMWQILWI,;
CCDS1480.1, Del, A_7,
(SEQIDNO: 91)
FTTKQQLCLNAIRVFTSMAATQLSVTVTVLGIPQFQSVLKCRLLPLQNLQ
RPVPQVLGLLTSLQSQIIQDILNLRKEYLTVWMFGSLL,;
CCDS33011.1, Del, A_7,
(SEQIDNO: 92)
RGRYHKVPRPMILEKATTLSPPTLVLLPCPGSCRPWQNNWQKITTTRGDG
RRSRSWKPKAVGPTPCWSPTTRSRPRRRHEIERRPRSY,;
CCDS42415.1, Ins, A_7,
(SEQIDNO: 93)
SGAGVRPNHHHRRGGHGDGGGHRLPAEPLQSLHAVLHQPPEPEPEAGGRA
AADHACPAVQGQVHSAVLHPEGSLQPLPAHLPLCAARD,;
CCDS47583.1, Del, A_7,
(SEQIDNO: 94)
VHLPIFPNSLAMVIRMSGCSSSSELTQTRGPRRPPGHQCYLSPHETWKVP
RMQPGSRMQRLLKVLRTPQSLLKAQKNLYLHQHQQSSN,;
CCDS54765.1, Del, A_7,
(SEQIDNO: 95)
WRSYWLEKMGQVNEGKASKPTEKLFKKKSGERESCMKHIRTLGPRRRQRG
SFNSTLRGSPSVRLFSNAWRCQKFWKEAIQQSQIYPPS,;
CCDS8518.1, Del, A_7,
(SEQIDNO: 96)
AASLPRKPRCCSTNNHWRAPNTAVHLHSFPSLTLDRCPASPLTTAPSLPG
YHLILIQQQEACSQPTRNTKTGRDTQVENLPPPSFHI,;
CCDS30960.1, Del, A_7,
(SEQIDNO: 100)
YIQVKKLISVKNVENVLVVGIISLFITKAYTLERKCGKNIKQHFINVMFV
RKFLKANQVWKCIFERIQVKNHTSVKFAISLLELRKH,;
CCDS31778.2, Del, A_7,
(SEQIDNO: 102)
KSMCKEQELLLNTVDQITQLKELIVLIDKRKNLFCRCCVWVIYTTLMYII
PSISLWKRGVTCSHGTPMDHGKAVPKCVKVFSEET,;
CCDS45068.1, Ins, A_7,
(SEQIDNO: 103)
NHLGPGGLSAGVAEGWGGPLQAAGAPAPRDHRESLPRAPERERVPEQHPR
VPARLRGFPAAGAPVSSFPASSASGNHHSLVCFYV,;
CCDS30621.1, Del, A_7,
(SEQIDNO: 104)
PCRNAKRMGGWNRSLGKGSVAPSSSVFPIIPAQEFCFRRKSQMILEMRMK
MKMSHQKKTLRMKSRHLREGCRRKPQPSPQGRPHL,;
CCDS12712.2, Del, A_7,
(SEQIDNO: 105)
SVQKRVAAVRKSCRDGYTGSYPVFLRPFVTSHIFSKKMMRQRQSHYCSVL
FLSVNYLGGTFPVYQKSRNLQRDKIQETFAQKRIK,;
CCDS2369.1, Del, A_7,
(SEQIDNO: 106)
WESWQMKTIHCNRIAAVISVTAMQCRKKSHCLQDSYITSTKTRKALITFL
TQRQDTSKNIIRLSIWPRQASRLKPSAPNSFLTSY,;
CCDS7282.1, Del, A_7,
(SEQIDNO: 107)
AKKMREKIKKKKEMMKLMNQNPNGENQAMIKIKKKIEMKGRKKIKEKMIL
KMMMKLKKITIKMNMTLWKQKKLRMKKMIGMRKK,;
CCDS5043.1, Del, A_7,
(SEQIDNO: 108)
SIKKKKNKEGVGREVLVVVVPVAIAELVVLVVLSLALHTVLAQVVVVLLL
GLLLLKGKRDTVGVDLQQSKLDVAGVEAILAELK,;
CCDS35009.1, Del, A_7,
(SEQIDNO: 110)
ARITLGWKEMRSLLCWRTQCPPKSQQSCSSNTTGWGKWSMALWPCLPSCA
LEPLVLRISRWAACPLPSSRLPAARCTEDTCLL,;
CCDS45641.1, Ins, A_7,
(SEQIDNO: 111)
NHQQPVSGPRRQCHGALWLHRGPGGRLAAGTAPGHQHAENLYHRHGGCQK
EVTVHPDEATGGRPHRHHQEVKAAFCALLPACS,;
CCDS42395.1, Ins, A_7,
(SEQIDNO: 112)
NPTGKRDAFLSGFRDRPDGDPGHEGRDPQDEGQARAAAEAAGEDDPCHGV
GGCPQRDRHHPGRGAAQDGQEGAHPHRLPPQAA,;
CCDS47512.1, Del, A_7,
(SEQIDNO: 113)
PPIPLPLPCSPPLLRRPCLPLQPRGPPLPPPAARPPPAARPPGVQQPQSE
PLRGQPPPPPPHPPLPSPPVPLGPWNGTTMMAT,;
CCDS13265.1, Del, A_7,
(SEQIDNO: 114)
ARAEVVVMNEREAKVRNGSEVETEKGKRAKAVKESEVEAKRGDGAAQEVE
IEDLEAATEVLTPDQNLTVPSEERLGCLIASN,;
CCDS34357.1, Del, A_7,
(SEQIDNO: 115)
PTVGRSLTSAGTVGRPSRPGTVSVCISLSTPGRSLTNVTAVGRPSSLSIP
LPSMAESTLGRSHMNVRSAGRPSVGVQTSPNT,;
CCDS53784.1, Del, A_7,
(SEQIDNO: 116)
ARLLASITGSASTWRRRRVWLTITVTSTMGLGILTPMCWQCSSTGTATIR
KWALLSSAAALSLSLHSTPCASSPGQAKCAS,;
CCDS3806.1, Del, A_7,
(SEQIDNO: 117)
ARYQPCITLTKMPNYLTCFSRQAAQQQGQLPGASQGCLSVHPLRTSAESV
TAKGMKRAPSSHPVAALGHCALSTSPASTSG,;
CCDS454.1, Del, A_7,
(SEQIDNO: 118)
IQGKNLLNAMTVEKPIAGRHTLQLIRKFIMERDPLCAMIVGRRLCIKPNS
WSTRDFTLERSLMSAVNVGKHSLGTPHLINT,;
CCDS30744.1, Del, A_7,
(SEQIDNO: 119)
FRRKAMGHQMDFMRKLIGKDITHLSWMKKATASDPRNPALPKESTFILQV
NRKKKKNHIRNLISRLNHCNLKTFLRMLQL,;
CCDS47512.1, Ins, A_7,
(SEQIDNO: 120)
NHPSPYHYHAAHHYYDAPAYHYNPEAHHCHHPPHDHHPPHDHQASNNHSP
NHYADNHHHHPHTHHSHPHLSPWDLGTARR,;
CCDS3158.2, Del, A_7,
(SEQIDNO: 123)
YMILIESPKVRTEKTTKSWKAKYLLSWLSSLCVLLHFILPEFHILTVKPT
IRLTVDCKINCLLLKKQLSFWQQLTFVWIP,;
CCDS41850.1, Del, A_7,
(SEQIDNO: 124)
KQLYIQNALNLSRPHSARLTASDTTRTRTCRTWRRSSASAASAWRRSFAA
SCTRGTSCTPWRAKISTMSTYREKLSGFP,;
CCDS43337.1, Del, A_7,
(SEQIDNO: 125)
WRNWKKEVMVKNQMRKMKRKKEAKRKVKKVMMTMTMMPQNRRNMMKKSKK
RKMTTLIHTLKMEMILAQTVMTTWMRQPI,;
CCDS56186.1, Del, A_7,
(SEQIDNO: 126)
ARAEVVVMNEREAKVRNGSEVETEKGKRAKAVKESEVEAKRGDGAAQEVE
IEDLEAATEVLTDDVPEAKVHSEKTRAL,;
CCDS3505.1, Del, A_7,
(SEQIDNO: 127)
HQKQKDGWCLQNLVASYLLVQDITVKSCLEKLWKYPDTMSKLLILYQGLK
ETQWLFVSLNMFILQDQTVCSKTKWFIQ,;
CCDS5659.1, Ins, A_7,
(SEQIDNO: 130)
NTRGHVLSSLGRRAAREHGQPATGVPGSESRHRHHDPPAQPRPVRRRGKQ
GEHPGGRGKQPGQSVPHGPRLAPLAV,;
CCDS47630.1, Del, A_7,
(SEQIDNO: 131)
QPLKTKSYSQRQKHQPQKNRNMTYLNLKYKLLKKSLKAEWLQRQCKKGNN
HRPRWKVYHLAHLRVYLKKMIRQPKQ,;
CCDS2150.1, Del, A_7,
(SEQIDNO: 132)
HKQKLSKKWLHYNILTHNFWSNLKLKDLHRNKLSKFSLLPHLAPLSSDPS
LFQDKVQCLRFLKVFNSPIHLSRCQ,;
CCDS46152.1, Del, A_7,
(SEQIDNO: 134)
PWSGSTSMNVTGTLAVLCPTLSWAMNTISEFTPRTSVGSVTHLVSPRTRP
ASSRQESPSNRSSIRSMTSGWLPSS,;
CCDS56590.1, Ins, A_7,
(SEQIDNO: 136)
TPETISDQQPEISQARNERGHCECAAECPGENQGTLDAPWKIICPACGMQ
VGESTSLPGDHATIFRKAGLSDAVK,;
CCDS45285.1, Del, A_7,
(SEQIDNO: 137)
CSQRRWIHLMRYATAFLCNSVDNMISQCLQFECFLKCRKLVLTPMPLLMV
IIIRLFWKVPGLQEVVVAIFFGQK,;
CCDS3632.1, Del, A_7,
(SEQIDNO: 139)
IMTSISPYSPRSKSSPARWRGVHGPWRGRRRRKRSTRMTRRRGKTRRRRR
LRQRLPRGPNMTMPTPRCLMTPRS,;
CCDS58199.1, Del, A_7,
(SEQIDNO: 141)
AASLPRKPRCCSTNNHWRAPNTAVHLHSFPSLTLDRYHLILIQQQEACSQ
PTRNTKTGRDTQVENLPPPSFHI,;
CCDS7417.1, Del, A_7,
(SEQIDNO: 142)
CVLFRVSTAETLKGVSLFIHFILQLGITECPWWNICYSMELMCMLKIKEA
LYLCTMHVLMDIMKLQNFLLNMEQ,;
CCDS1479.1, Del, A_7,
(SEQIDNO: 143)
FTTKQQLCLNAIRVFTSMAATQLSVTVTVLGIPQFQSVLKVLGLLTSLQS
QIIQDILNLRKEYLTVWMFGSLL,;
CCDS34723.1, Del, A_7,
(SEQIDNO: 145)
AGRKNNTFQNVKRHFVKDLGSHQELRVQLQRLILHLMVQILDGRQRSKHG
WIDMKKQITTSTVRVFRGRHKE,;
CCDS2314.1, Ins, A_7,
(SEQIDNO: 146)
GLQCSIRCSRSCTISVCLNRSCDWNNSDCCHLCGGPLFIHKEMPQKQQNS
QTEAKYRALQFRQYNKSVHEVNL,;
CCDS4950.1, Ins, A_7,
(SEQIDNO: 147)
NRLVPGVARFLCQTHLQLGGQECAAAPEQLGHAQYQQPQLPHPQEVLPGC
GGVRPRLSRRGGAQDLPETCHL,;
CCDS47339.1, Del, A_7,
(SEQIDNO: 148)
QQPIHMSSWCCTKIKFTTSRSVIRRKVKFTCWELDSEGKRTFCLCQILLT
TSGKCHFCSLMGKTEVPDTSAH,;
CCDS3356.1, Del, A_7,
(SEQIDNO: 149)
ETTQRGYRTLQKMLKLRTHPGKDSGRTSTVFGRETQSLTKRPEQALTRPW
RQPPRSRARQQRKICLMHVNH,;
CCDS3444.1, Ins, A_7,
(SEQIDNO: 150)
ILTPFSRRAALRRAAVHATSDGSCPLAAWNTEPGDPARHPAGGGAARPLY
VHKSPPAASHGLLIGGDGKFQ,;
CCDS32866.1, Ins, A_7,
(SEQIDNO: 151)
NRGPTCPQLQRRGPGEGQDQGQGPRAACGEAPCGQEGPAGQQPPAQGRAA
GRDQEEAIFGHSCGHLREREA,;
CCDS30975.1, Del, A_7,
(SEQIDNO: 152)
PPRALPAVQRRPHLNLPRCPQQSLPEKWQYQSPPEKSRCPSRRPLPHRPL
QPPQPLSLHPQVKMSPVPHCC,;
CCDS763.1, Ins, A_7,
(SEQIDNO: 153)
SRPRFHSAADLHYSVSLLPTGGRPIFQLFFIPQTDNEIFTRKCCSVYSSP
WHSFHYCTDHSLEFTYEVNWK,;
CCDS43145.1, Ins, A_7,
(SEQIDNO: 154)
AERSGEQCRSLTVYSEKNKRRQNESSPFPCKPEQLVVWEPRGAQRRTART
SSSSWGAVRGAGRPGPAGAG,;
CCDS58907.1, Del, A_7,
(SEQIDNO: 155)
ILPKSTWDLPRRRLCQTQANGFMKKSHIKWICSMKMVLVLVFMKMYAKQL
VTSASGLLLLEFRTSMKSSS,;
CCDS47741.1, Ins, A_7,
(SEQIDNO: 156)
TDGLHGRNGGARSHQGEWTVPPASEESLPFPPQYRQWTHRGRLGRKKQET
SEAPVHPEVVVCAVSVADHE,;
CCDS33489.1, Del, A_7,
(SEQIDNO: 158)
GHASCGRISWMGRRTGSCGFPWPARRGSPRPPTFFRFDRMCTQKSQILTF
TTSWELLPEKTATPRSARA,;
CCDS14104.1, Del, A_7,
(SEQIDNO: 159)
HRPASSTGSAAWTWTGTAPCPCSSSSTSTRSSAEGWTAWPSRPCPSRTAS
ARCWTWSSRGLKGRSRCRT,;
CCDS1764.1, Del, A_7,
(SEQIDNO: 160)
IRTAPDGMEMKWPKEQRDAKGAEMPAARGSKSWPLQLQKLAASCSSPRGT
GQAPEGLLGGPQRERELLS,;
CCDS33097.1, Del, A_7,
(SEQIDNO: 161)
LTNAMSVGRSSLRIHTLQDIGEFILERNLTSVMSVAKPLVKLQNLQGIRE
FIPERNHMSVGNPLVSVQA,;
CCDS33425.1, Del, A_7,
(SEQIDNO: 163)
AGVRKKKEGPGAEAGGHQRKTHQRKRSTKEGLSSLTPSCPCTPLMCWTCP
WTQTNPRTACATRSPMGR,;
CCDS31448.1, Del, A_7,
(SEQIDNO: 164)
FKNGWKMRNINLVQLQRAMVMPMENLQVFTVEIPIQNQPFIIQFRGNQFI
CHLPKKLRIYQEGRVKDL,;
CCDS9890.1, Del, A_7,
(SEQIDNO: 165)
GSISIIRKQRGSMGRRVAAGLRQTPILKRTNLPEALEAVKRNLRNRIKEI
MLQLILDIALFGLRTFRL,;
CCDS9273.1, Del, A_7,
(SEQIDNO: 167)
DLEQDHVLPSTIRHPSPGLDHTQKQSILFPVPIGQCGGRGPAPGPLGGEP
TPLRDGGKRGVCPLPTA,;
CCDS47641.1, Del, A_7,
(SEQIDNO: 168)
DRERKKKRRNLVGIHLLLHQALILPAVLLILKMRIRNKENGERKRRTVHI
NLLKAPCQKLNQTVRIV,;
CCDS8326.1, Del, A_7,
(SEQIDNO: 172)
LQNLIQWKICSSTSIQSHGKKILRICIWTPLGIEAGHTMTGSQKLTWIGS
MMMPSVTVALPGITRSI,;
CCDS3920.1, Del, A_7,
(SEQIDNO: 173)
LTRMLSLLTLMKQLCEQPKTSSPSSLKNVVVSKVKKITDHCLKILFKTFF
QQSISLNGQLLNYSLVC,;
CCDS3204.1, Del, A_7,
(SEQIDNO: 176)
GNWSIMLKRPMVKMMKILMIKIMMEKSKKFEMTTAPKAERNTTRRKKRRK
KTGLQLLRNHIEELKC,;
CCDS607.1, Del, A_7,
(SEQIDNO: 177)
HKRISSVNKLCTRQYWKRMLKILCTSTLCLRLDTSQSVIPKRKKTFIRFP
PAKRRKVFMMCQKVNL,;
CCDS2614.1, Ins, A_7,
(SEQIDNO: 178)
NKAHAAQWLPEVPGPQRQGAGSAADVQQILLCRDRSQCFLQEPQSHRGKS
CPTGHQSHQPQCQAAQ,;
CCDS10987.1, Del, A_7,
(SEQIDNO: 179)
ASPSLRLSTVRSTSRLSTSSWWPWSLWSRTTSWFCSRRALTTLTHSCSSA
MPAAFKRIRRWLETS,;
CCDS35049.1, Del, A_7,
(SEQIDNO: 180)
ERKEEKRRNSNRVKQMSSGILLLRKFPRNPPMLFVTLNMIFHCQTQYRRI
HEKKIGKSGDKEMSS,;
CCDS2702.1, Del, A_7,
(SEQIDNO: 181)
GRNQLIQKARIPLPIPPLLQNHLQKVNLNMREAEGGNIRGGQKLNVLKRG
ERKQAVQKSQGINMQ,;
CCDS10239.1, Del, A_7,
(SEQIDNO: 182)
NMIHLILPGMAELGFARADYQVAPPCLIKMEYLLIQLAANSWREPMEFSR
ETKISNPSLPFQSTC,;
CCDS31823.1, Ins, A_7,
(SEQIDNO: 183)
SLFNLLLTCDCCLYLLWKLHLHVCENISKGRSCFDKRSSYTQYLCRSYAE
SIYLHSKKPAGETSI,;
CCDS1618.1, Ins, A_7,
(SEQIDNO: 184)
GDKQRTLFLGITDSHQQYLPTYTLHVTTIFPPLEKTMELDSSLPEYNMFP
RKGRGLPRTNFQSH,;
CCDS6367.2, Del, A_7,
(SEQIDNO: 185)
KTTMKQLQCWSRRFHLNLKVRKKMKLTLAVLPTLRNLHCYPQLCLQGRLA
ARNANMNLEILLGV,;
CCDS32009.1, Ins, A_7,
(SEQIDNO: 186)
NHLGPGGLSAGVAEGWGGPLQAAGAPAPRDHRESLPRAPERERVPEQHPR
VPARLRGFPAAGDV,;
CCDS6045.1, Del, A_7,
(SEQIDNO: 187)
QGPYADRRKMNVIFLRCALATRLPVLRTSSGSMDFLARTQKATVSWGNVQ
LVRISALNYLMMRQ,;
CCDS2061.1, Del, A_7,
(SEQIDNO: 188)
SFGHILQGVKRNLSYFVIYQSHRNHISATEIDSHQNKSLSTCPSWVVTTY
LMSNGTNNLRMEIH,;
CCDS3411.2, Del, A_7,
(SEQIDNO: 190)
FHLSQPLILVLTKKELQRTWLIKKNLQLTLEVKDWKQPQSLKSSATSPVQ
SKKLKITQKSIII,;
CCDS11213.1, Ins, A_7,
(SEQIDNO: 191)
ILPSSSAHVFWFCLWKLLWQLSILSFCFSTIPSRYAAYSGRKLIFPTIGS
SQLSTSFQRFCQY,;
CCDS34049.1, Del, A_7,
(SEQIDNO: 192)
ILTSPAIKSSASHGRDALRAPVFVNYRISAQRMALQCVQLTGEASQHTVN
KRVWNVFIQGQSF,;
CCDS3210.1, Del, A_7,
(SEQIDNO: 194)
KKRKKKMVKRKNPKRRKLQELLKRRKLRKNSNLSHMMIRFFWMEMRCMYG
SMTQFTLKHLSWD,;
CCDS32165.1, Del, A_7,
(SEQIDNO: 195)
MMTTFPHPRTKTLILPKSLWMTFSPMMKTTQGKESSSSTAVQPRLPSRAA
TRSPRGCGRSTTW,;
CCDS41997.1, Ins, A_7,
(SEQIDNO: 196)
NSAEPCEWHVITTVPSEHIGQGRCCGALYPGSQCRKLSCAGGPYKAPVSQ
YCLKCCSWKIQIR,;
CCDS41699.1, Del, A_7,
(SEQIDNO: 197)
SWKWLTKSRMKNEWYNLKRVLVPFLAPGARGLLCCLQRHLREVVAFWENS
WASLLPHSSSFFN,;
CCDS2751.1, Del, A_7,
(SEQIDNO: 198)
TFGEELSITNRQTGRLSWMEFFTMPPRTWFMRQLQRMWFLRPSMAIMAPS
CVMGRRELARHTP,;
CCDS9464.1, Del, A_7,
(SEQIDNO: 200)
ASQVCSVSLPRLPSFTIYFCMAIPSLDFSLMSSLTFIMRLVCTWKTMACM
KSFRGLFWGCSW,;
CCDS11144.1, Ins, A_7,
(SEQIDNO: 201)
NASTYSGPGRTARRGGRGSAKAAAGKGDSRGQDQEDGRGDSASRGPKFQV
HQRKETHGRSHC,;
CCDS31499.1, Ins, A_7,
(SEQIDNO: 202)
NIICHVFTHIHCDNGGKPPHLGDYYWQPLLGLPNVLLPCLLVTYGCHIFH
CHVTQIDDRLTL,;
CCDS45246.1, Del, A_7,
(SEQIDNO: 203)
PSPSSSFRTEQTATRSWVWTRSQRRAKAKQALISKSSPHSHSLAALIRKV
RNSNNSGTFSSR,;
CCDS1870.1, Ins, A_7,
(SEQIDNO: 205)
WKRGSNNTQREVLEDIYPSRGILEPRAREAEPAVQPHPEHADQPDGGGGQ
ALQYKPSELLRT,;
CCDS42041.1, Del, A_7,
(SEQIDNO: 206)
KLPQRNKNLCLRKLQDLTWLKEKQKHQILKVNKIKLLLQKKKMDVMQIHL
KAHQQQKVKKA,;
CCDS44603.1, Del, A_7,
(SEQIDNO: 208)
LHHQAIVKSLERTRMTLPLILQCSPHPACTPLWTNTCCPERSGSVAQSHL
LVSVHQSLPAF,;
CCDS2430.2, Del, A_7,
(SEQIDNO: 209)
LITPSFAASTPKGRSSQAALPGSCGSSHLSRPRPTRWTCPYTSWDGTRPS
STSREWATTPI,;
CCDS389.1, Ins, A_7,
(SEQIDNO: 210)
NPPEGANCLSEERVYSAILLHTVPHWIYSSTCPPTASSHQENLFKLLKRH
FKSKGCDQCPV,;
CCDS58232.1, Ins, A_7,
(SEQIDNO: 211)
NSYWGRGLQCPGWRGGYFGPSHCCLCEAVSSCSSLRPNRSANPNKIFVYL
IGSSRERSAVP,;
CCDS14104.1, Ins, A_7,
(SEQIDNO: 212)
NTDQHRVLVPLHGPGRGRRPVHVRARVLLRGAVPKAGQHGHRGPALPGLP
LPDAGPGQAED,;
CCDS1180.3, Del, A_7,
(SEQIDNO: 213)
QPKKRLDPKGVRCPRNRLSLPLLQEPACPQPWAVPHLPRPHCQLHPTVLQ
LRTRKQWPNVR,;
CCDS10159.1, Del, A_7,
(SEQIDNO: 215)
SERCLLVCLLLYMHHPQIQMISTVNLLVIHLLSHQPVCSLALSLCKMGPT
ILLTFGVHQMG,;
CCDS46348.1, Del, A_7,
(SEQIDNO: 216)
CRFIGPMLRCSLPLLLNCHILVLEKEVSLGLDLQLTLSTLFTTEKKLLKP
TFVIPCKSLK,;
CCDS53826.1, Del, A_7,
(SEQIDNO: 217)
DKQPSNWKPTGVGPWLGRQSKGESGPCGLSESSLKDSSVATNPSVLTTRN
LSCLCGRITS,;
CCDS58928.1, Ins, A_7,
(SEQIDNO: 218)
NRPQDLGIYRRAAWKMAVHRDTINLFSSLSFAKYSPGDLYGKQSCCDVQL
PRPCNSKESG,;
CCDS2872.1, Del, A_7,
(SEQIDNO: 219)
CSINGSSKRTTRTRQTMQEAPDFLFLVKDQLLSRIAPSKLSCLGKLQSML
LDRPRLPKL,;
CCDS1591.2, Ins, A_7,
(SEQIDNO: 221)
GSKGRRKETGPRNRYFQEKEEERTGGQEIQKEVRSQYFVKWTDWTGWKIQ
KWNTDSEPS,;
CCDS9287.1, Del, A_7,
(SEQIDNO: 222)
KNLSNPRWNLNQVYLMILPFQRMTVKGYIPTAEKRNKTLKVQEREQGRTW
GWSMALRSP,;
CCDS46500.1, Ins, A_7,
(SEQIDNO: 224)
NQASCTNQKTQEEEKAWTSSTPKTHSTCSPPREPQHARQRLTASGGLSHP
EPIHARAEC,;
CCDS35493.1, Del, A_7,
(SEQIDNO: 225)
RRKLKKKMLQEKEKHYKLLKNGKRKRWNILKRKIERRENMKEQRNRKRRK
LLPRKRKII,;
CCDS31195.1, Del, A_7,
(SEQIDNO: 226)
SPSQAVSLGRSTHLSQIQPRPVNTYWTSAQPSMGLMHRWALGSLPMFYLT
MISLCKWPI,;
CCDS58290.1, Del, A_7,
(SEQIDNO: 229)
DLEQDHVLPSTIRHPSPGLDHTQKQSILFPVPIGQCGGRESQPPQGRCAR
SPVRAARQ,;
CCDS5135.1, Del, A_7,
(SEQIDNO: 230)
EGRGKEKNLIKEKVKKQYLTAKVWNPAKKSQSNEKTNSSRRSEKSKINRN
RYQSALYT,;
CCDS14649.1, Ins, A_7,
(SEQIDNO: 233)
NGDYVSIYCNFRGECSPGSHFAKRLCTVRKSMGNPPRGFTDRFSKTGRSA
EPHSGRDT,;
CCDS1235.1, Ins, A_7,
(SEQIDNO: 234)
NSGEFKTFNSAQAFIASSSTQDSNKLQCSSKNFIHYSDSTNAYAIGKAAT
NYQFTTCTH,;
CCDS54068.1, Del, A_7,
(SEQIDNO: 235)
PSLNLISHQSSVGCSKGIWRAPEMTLFSTPTFAASSPWASMSWVSSGCSL
PLWSSSCC,;
CCDS43472.1, Del, A_7,
(SEQIDNO: 236)
QEKLQREKENVSLFVVLASRNATAGNMYIITAMLTPAVRYGNTKSQSLTK
SLVNSIKN,;
CCDS3656.1, Ins, A_7,
(SEQIDNO: 237)
RAKFMYLFEGAQTVRNRDDCLDDNALRCPPQFHRWPGDWGFLHLVSPSGT
QYFHSNPM,;
CCDS7171.1, Del, A_7,
(SEQIDNO: 238)
RSCGTLFSGLKMSSTDGVMGRRCLLMNSLTKRKPTWKLSQWIKILLLPMI
NQQPQLEL,;
CCDS47865.1, Del, A_7,
(SEQIDNO: 239)
TRRNRKNPRRKKSPRNPRPRKPLRFPKSQRKRKQKLPRQNPNPAKSQVIR
NLTQKQVL,;
CCDS53348.1, Del, A_7,
(SEQIDNO: 241)
EFSLSFYLYIMSMVFSKLVLRLGDHLFFCLKTTLENLPQKTIPSSELLTS
LTGSGIG,;
CCDS1829.1, Del, A_7,
(SEQIDNO: 243)
QDLIHMERISSPLVEFVKVLCTNQVLITARAVPTKKASVRCVEKRFWIPK
TTSKHLS,;
CCDS58960.1, Del, A_7,
(SEQIDNO: 244)
SHWGNHQDSYILGGVYFGISTVQLQRDVKHVNTQVKQKPSMITLLCHLGT
LEVQGPH,;
CCDS6435.1, Del, A_7,
(SEQIDNO: 245)
YLTACRGNIQITAMERSRTNVQSVGKSSGSARSLISIRESTRERNPLNAL
SVEKPSA,;
CCDS56402.1, Del, A_7,
(SEQIDNO: 247)
FCQGKRKLNKRKKKLHSNFKKNCDGEEHSYMLGMSCLGSGDLHGNGHYMG
NPLQLS,;
CCDS4259.1, Del, A_7,
(SEQIDNO: 248)
LFTRQLISVRCLYPQLMVISILLWRSQLLALILKQARKRIRTKRKSLSGT
TELLCL,;
CCDS31658.1, Del, A_7,
(SEQIDNO: 249)
LLRRNEKNRKKKNTKLENKYFNKENRSLKKLLKNSSVPMFLFHSGGKQFP
ENQFLH,;
CCDS32261.1, Del, A_7,
(SEQIDNO: 250)
LSTDWRLQPSRPQRQPHRPSPPPRMQLFPTRTLRPSSSWSRVARQWLITS
LSWSRE,;
CCDS12121.1, Del, A_7,
(SEQIDNO: 251)
SAGKSGTSSRRKKAGRRRRNISMAWRLGCQLALLRIRSYRGKSCISRSKT
CPSWSN,;
CCDS13571.1, Del, A_7,
(SEQIDNO: 253)
WQLKTSPQRLLEEVMPKKGPGPGLWVCIMAADCSAAHLSSAVTGWCPPHT
ACMGET,;
CCDS3352.1, Ins, A_7,
(SEQIDNO: 254)
YRKLRLPVFATRSYRKIVCSSCVTERKCATQEPGQSYEGDFSDTSAGSTD
AQDSKS,;
CCDS10539.1, Del, A_7,
(SEQIDNO: 255)
APFSPKVWRTARGASLSCQTTPPITLSSTPTGMTNAWLLGDAPRTLTNTR
CHPRR,;
CCDS32595.1, Del, A_7,
(SEQIDNO: 257)
EPSPKSWLPSSLAPPSPMSTFPFNLEIHEILLPWDSILSLWITSTSGHKA
SISGAS,;
CCDS34645.2, Del, A_7,
(SEQIDNO: 258)
FILERISTNVKSVEKPLTGPQTFLNLRKFILEKNPTNVKYVEKPFTNPQS
LLNIR,;
CCDS46227.1, Del, A_7,
(SEQIDNO: 259)
GKTRCLIFIDLQQEEAILGERSMPFIVVTQLLLMRNALKEGNQRAWQEQE
IDVCL,;
CCDS42127.1, Del, A_7,
(SEQIDNO: 260)
GPRTPQPSRSRTLGSVRPGRPGMLGTLAQWGRRMRNRQPWGRNGSGRAPE
NTMGR,;
CCDS5043.1, Del, A_7,
(SEQIDNO: 263)
PQKMLKEGMALVYLREVNLIVMRKKKTLKMLRLQVVGKSPEVHPQFLKKS
TVTLR,;
CCDS30652.1, Ins, A_7,
(SEQIDNO: 265)
TTAAEAEAGISPAILCSRRQRQQGRVLRRPGQAGLPEPPEPVRWTVLTAP
LLDTQ,;
CCDS6160.1, Del, A_7,
(SEQIDNO: 266)
EKSVKEIKCFLTMNLNIAKVLLKTKVYFMYLTSLSKNPKIFMHRNLKQKW
HLGI,;
CCDS56403.1, Del, A_7,
(SEQIDNO: 267)
FCQGKRKLNKRKKKLHSNFKKNCDGEEHSYMLLMWSWIQTPLIPSSSCQR
TGEV,;
CCDS53435.1, Ins, A_7,
(SEQIDNO: 268)
IRGKCCSKQGETKSQVIAQRSHSSSSQNTLWGSSHYREGPSRGGSGWSGS
CPQG,;
CCDS6490.1, Del, A_7,
(SEQIDNO: 269)
LKDLIWFRSQVIMLDWDPCLPSFTPVPTSRLSAGLKKLSKKANRPFLSSI
LLFT,;
CCDS10932.1, Del, A_7,
(SEQIDNO: 270)
MFIVFSMSVTLRLNKMKKPKSLLLELDGKRQSKGGEGLLQLPASGRGRYQ
KRRG,;
CCDS42801.1, Del, A_7,
(SEQIDNO: 271)
SVSRKAGLVSSTKPLVQLGFTLKRYRSFLNIEFLQTPKLTRKLSEWSRRK
LLTC,;
CCDS3158.2, Ins, A_7,
(SEQIDNO: 272)
TCFCKNGLNLHLVLFVLHLPAKYDLEQQGSNTIVCEKVCFLKGASGAEMA
SNGK,;
CCDS2800.1, Ins, A_7,
(SEQIDNO: 274)
EARSPGDWVPGPPASGVSLTACEPPASQVPSGPLLTSLTPVPSPAPGHLL
CFQ,;
CCDS1179.1, Del, A_7,
(SEQIDNO: 277)
HLKKRLEPKGVRCPKSRLGLPALQEPARPQPWAVPHLPRPHHQLHPTLPQ
LRA,;
CCDS7452.1, Del, A_7,
(SEQIDNO: 278)
KGTLVGQHLRAFYLTVSTRKLWRTQKSQVSMNAPLRKMLSRRAKAGGSSP
GRL,;
CCDS1807.1, Del, A_7,
(SEQIDNO: 279)
KKNHKDREKKKRNLILMIKVHKFEHEILLPSPLHNLSKYTDKLQKARMLL
PPKA,;
CCDS2382.1, Ins, A_7,
(SEQIDNO: 280)
NLPSQQWNGVSGSPLLVENASQLHCRKGISQLANPKWAYCHKGTSYSNWT
SNG,;
CCDS58395.1, Del, A_7,
(SEQIDNO: 282)
IAVSCAGRKWDLLGLNAGVEMFTVVYTVTQMYTIALTITKPMLLRKSEKK
IQ,;
CCDS3411.2, Del, A_7,
(SEQIDNO: 283)
NQQTKVKRSQTAMRKEKERKKRRKRLKRNLITQKRVKIHRKLKMKNKQRK
KK,;
CCDS5768.1, Ins, A_7,
(SEQIDNO: 284)
NRWTANHYCMHRKPSVPSKKFLEWSLEVRMEVYNHSFNHSSGWHLENSGS
LL,;
CCDS4597.1, Ins, A_7,
(SEQIDNO: 285)
QQPYQAWPQELGEQRYSGADQRYRCFWLLQTQQESGFRGRQTQGQKGWRS
QA,;
CCDS4056.1, Del, A_7,
(SEQIDNO: 286)
SHWGNHQDSYILGGVYFGISTVQLQRDVKHVNTQVKQKPSMITVLQQLPV
QC,;
CCDS33971.1, Del, A_7,
(SEQIDNO: 287)
TRPYKIYHQPTHLWEQETTFQLDQITALSTAVKPITSTANRCVYIHTLLC
LA,;
CCDS10504.1, Del, A_7,
(SEQIDNO: 288)
AQILSSAARASDAFVIKRCLDPKRLSPSSDSSAVSGCNPSCTPRSRFWSF
W,;
CCDS47388.1, Ins, A_7,
(SEQIDNO: 290)
DSVQKEKERARVERNGMEHNEARTKHKSEAPGGTQMEKYPVCISGRETFS
L,;
CCDS1482.1, Del, A_7,
(SEQIDNO: 291)
FTTKQQLCLNAIRVFTSMAATQLSVTVTVLGIPQFQSVLKCCLHLVQNLQ
L,;
CCDS47683.1, Ins, A_7,
(SEQIDNO: 292)
KEATVFDFLLLLLLLLFLADIPLVSTVRASQKELCFECQFCFELLSGGPS
L,;
CCDS1825.1, Ins, A_7,
(SEQIDNO: 294)
KQRHVHRAGLLHEDEVHGHQQRPYCQPQVSHLEGLALHGPGESLQQLPSS
Q,;
CCDS41813.1, Del, A_7,
(SEQIDNO: 295)
LRMQRFFIICANSSSYRIEATIFFHFCGNLLHPSLNRGLRSIITWICFGI
S,;
CCDS43183.1, Ins, A_7,
(SEQIDNO: 296)
NLPYCQLSTTGNDLTDEKASRFFTFPIITNRGNKRRNNCKSTPHFHGTCT
R,;
CCDS628.2, Ins, A_7,
(SEQIDNO: 297)
NPREVQPLLGCGQSEQASCRSILYGSPNLSPNCNSRLLYYPTFHDGIRWE
L,;
CCDS53588.1, Ins, A_7,
(SEQIDNO: 298)
NTLQISAIRPSGHPNKHKATAQEKPQESRRRGRIFSIQETNTISRQSHAH
A,;
CCDS43350.1, Ins, A_7,
(SEQIDNO: 299)
PSRPQQQAIQTQISFEKPRYPSKRRVMEAHSKRTCGSIRIVRRTIKRDSI
H,;
CCDS47517.1, Del, A_7,
(SEQIDNO: 300)
REKKRHCDRHLIKMIDLSKGRMLKILDWLLRFTKTCRKPALLEPFLILRW
L,;
CCDS30956.1, Del, A_7,
(SEQIDNO: 301)
TMSTFGSPQILVVLMNLLNLQSLKGISLVCCVNQVVFHPQISSGRRKALQ
C,;
CCDS9140.1, Del, A_7,
(SEQIDNO: 302)
DIKQTGTRWNLCWELWNTNLVHKGTSPRNVLLQTTPQPSRLMSTSMKSL
I,;
CCDS5747.1, Del, A_7,
(SEQIDNO: 303)
EIRCVQAVVILCSELSSVHEVLSSCVALFKGAREHICLRETYRLISTIA
I,;
CCDS7086.1, Ins, A_7,
(SEQIDNO: 305)
ETSRGREKEARRAGQTSARRRSSCSDERKRRIHSASSGSLGTTSFKKGT
S,;
CCDS33931.1, Del, A_7,
(SEQIDNO: 306)
FILERNPTNVKNVAKPLDGPQIGVNIRKFIVQINPTNVKNVTKPLNNFR
S,;
CCDS2311.1, Ins, A_7,
(SEQIDNO: 307)
KPNCDCRLVQEICATKEVPADKEFRLSNSVLYPGLEGSKNSAGTEASKA
L,;
CCDS5135.1, Del, A_7,
(SEQIDNO: 308)
LIKEKVKKQYLTAKVWNPAKKSQSNEKTNSSRRSEKSKINRNRYQSALY
T,;
CCDS55861.1, Del, A_7,
(SEQIDNO: 309)
MWECKIVPKMGSLYQQTLFGILKKMELFFTHTQDCVLVLIGHRRADLMY
K,;
CCDS46935.1, Ins, A_7,
(SEQIDNO: 310)
NQEPKEETESNRTTERTSSNWKTARKKSVGENSERNSPSPGAGRFGIGY
L,;
CCDS2644.1, Ins, A_7,
(SEQIDNO: 311)
NYRLCHAGFIEWWLVHYGDLICGILCEAKSGGCPETPRILEIPAKQAEES
R,;
CCDS4441.1, Del, A_7,
(SEQIDNO: 312)
QIRKFILRRKDMNVENVGKPFTRVRTLSITKEFTLARNPMNVRNVARPS
Q,;
CCDS2387.2, Ins, A_7,
(SEQIDNO: 313)
RFRNAEVHQTSGDELVACSLISVNQGSTNSDRGDVRRHPASCLGAPAQH
G,;
CCDS44335.1, Del, A_7,
(SEQIDNO: 314)
RKSWKMKSPVDTVLSKENQICKVKTILAPAPHALSLPRPQPFFRAIDKD
R,;
CCDS47741.1, Del, A_7,
(SEQIDNO: 315)
RWATWEKWRCKVPPGRVDSPSRLRRKPTFPTSVQAVDTSRETGPEETGN
F,;
CCDS389.1, Del, A_7,
(SEQIDNO: 316)
SSRRGKLLIRGKGLLSYSAPHCASLDIQFHLPAHRLLSPRKLVQVAQKT
F,;
CCDS42161.1, Del, A_7,
(SEQIDNO: 317)
TLVVKNDFLATVAVMENCFFGDKHFISSQNSWLMNLLVLKTLILSSAMS
H,;
CCDS46543.1, Del, A_7,
(SEQIDNO: 318)
YRKSLFQKSRRWTSGLWTKGRSALTLRVAIMKRPKNPIRQIRKKERKQI
E,;
CCDS34238.1, Ins, A_7,
(SEQIDNO: 319)
CNPALPVGICSQCPEPVHLCGPASTEQSPCGRHPSPESPTVHRCGPSA
G,;
CCDS55520.1, Del, A_7,
(SEQIDNO: 321)
GNGSGGIKKSSKKTISFLQALIFLGSHTRQTKVMHLPTESRTRLETMM
K,;
CCDS10525.1, Del, A_7,
(SEQIDNO: 322)
GRRSISLLRSHQRKLRACGNWRVPLTPCSHSLALLLTTTCSRRPLPWT
R,;
CCDS43378.1, Ins, A_7,
(SEQIDNO: 323)
KTGSVRKANRMPKDVNIQVRKKQKHETRRKSKYNEDFERAWREDLTIK
R,;
CCDS164.1, Ins, A_7,
(SEQIDNO: 325)
LQIKERKISKLQVSSGQICKSEKCGCCCQSQGGCSTGRGEGIWGGGSL
P,;
CCDS56486.1, Ins, A_7,
(SEQIDNO: 326)
NPLGSMSPQGQVCPALCHLFSHGGICPCAAGLGTHQRAGGRRAASREG
V,;
CCDS47270.1, Del, A_7,
(SEQIDNO: 327)
NYAKRCGNLKKHFINKMEGMPRKRIVFQCLRSTESTRKLKPSLGFLKF
L,;
CCDS387.2, Del, A_7,
(SEQIDNO: 328)
CFIRAKLHIIRQDLLSSSAPHDASPDILHLPACHLLPRKPAQTARKTF,;
CCDS7816.1, Del, A_7,
(SEQIDNO: 329)
FSMLTTILVSQLRGLLLMLDCYVILCVRSVWIPDLYSIDHCLCLVLYL,;
CCDS41302.1, Del, A_7,
(SEQIDNO: 330)
FSRRGKLLIRGKDLLNFSAPYHASLNTFHLPVHQFLLRELVQTAQKTF,;
CCDS34490.1, Del, A_7,
(SEQIDNO: 332)
LLLAIVQAIMSKKFLLKELKILRHQKLSDALPMVPQDQKATIFQIYHF,;
CCDS48164.1, Del, A_7,
(SEQIDNO: 333)
LMELNLLHQKRLKKRKNFSHKVSQTGLNEILTSLLKLMRNMEEMTLIT,;
CCDS33489.1, Ins, A_7,
(SEQIDNO: 334)
RVMLLADGSAGWGDGLEAAASRGLHAEAPHGRRPSSDSIVCVRRRAKY,;
CCDS33125.1, Del, A_7,
(SEQIDNO: 335)
SILGKSPMNVTDVEKPSFRSQTFIAIRKLIAERGPIDVVNVEKPSSGN,;
CCDS34681.1, Ins, A_7,
(SEQIDNO: 337)
TTPRGLAICRTKSSISRSLFLGLPPVLARKSRARSRFQTNRKVCFILK,;
CCDS8511.1, Del, A_7,
(SEQIDNO: 338)
ALRNMNTVMKLLRKMRALWACPLSYKPIMLWKKWKNLFVRYGKVGGE,;
CCDS54379.1, Del, A_7,
(SEQIDNO: 339)
KICCFNSNWMMLATKLTIKKKQYLIFKPDVMLEYKTFKLSAESTVFY,;
CCDS43121.1, Del, A_7,
(SEQIDNO: 340)
KKMTQQYPLSLKSQVKTIIRIQNCLKKLQLNLQKVILLNYPHLTVRS,;
CCDS14482.1, Del, A_7,
(SEQIDNO: 341)
LLQKDRFREEVKSPVKWSKFQSLKGSLIPSRLYMMKGLSTSSPQLKN,;
CCDS8336.2, Del, A_7,
(SEQIDNO: 343)
QRKKRKKRARNRNMKKTMSHLIAHQALKMSGLRLFHPRLLTRKKPGK,;
CCDS14448.1, Del, A_7,
(SEQIDNO: 344)
VKTEKEMEKMEKRKEKMKKRKKTEKKQEMEKRMKMEKRREIKKRGKM,;
CCDS34343.1, Del, A_7,
(SEQIDNO: 345)
YGLAMAKPNLVPKLSWQTSNSPTGFSVQNLSVENGGSLPRKSSLLHR,;
CCDS59085.1, Del, A_7,
(SEQIDNO: 346)
YREHRREWEIQLVNESNSVMTEYARVTFSTVVLMMSFLELEWILENV,;
CCDS54597.1, Del, A_7,
(SEQIDNO: 348)
EEAMETHLIPDMMMEEGHQETLPEEWVESIICVALVPLQWLVDEEG,;
CCDS14406.1, Ins, A_7,
(SEQIDNO: 349)
GDPPLPNICCSAPGPTGTQETGHTDAKTAESGDPLGSREPNTSQTE,;
CCDS2335.1, Del, A_7,
(SEQIDNO: 350)
HLYQPSIKLFKIQIMSSWSLSAISCLSSIVAQRFDLRGSHCSSCQN,;
CCDS31131.1, Del, A_7,
(SEQIDNO: 351)
HWNSAYLGRTLLVTCILYHRWIVTSMCQSQRWLTSTTSRSSALMWT,;
CCDS55872.1, Ins, A_7,
(SEQIDNO: 352)
KQPTRKPYHCWHKINQEWISEWGPVGYERRGICGESLYSGENKVIA,;
CCDS5046.1, Del, A_7,
(SEQIDNO: 353)
KSLVKKPNYWYLQSLFLSLCLPNTTSEQCLIDGWVLRQYVLSTFNI,;
CCDS4999.1, Del, A_7,
(SEQIDNO: 354)
LAGVRGLPKGGLPFSGPGSRIPTFRRAGHEEAWGTLPWTMTMLFWS,;
CCDS10622.1, Del, A_7,
(SEQIDNO: 356)
SNSTEKLGRKLEVQKIYQTQKNPLKNWSQHLAKLNKKKSKERSDEK,;
CCDS53389.1, Ins, A_7,
(SEQIDNO: 357)
TEPCLSHGSQHSGHQEFKTSVLLGTSIVDQKQSIEEVEDTPKPTLV,;
CCDS58089.1, Ins, A_7,
(SEQIDNO: 360)
WSCDYGRAEARLFPLSRGSCGSVLPEKHVGPAGRPPLCSGKGAHQD,;
CCDS55733.1, Del, A_7,
(SEQIDNO: 361)
AFLVLKREFTTLNQLRMPPMPPFYYVTREGSCGFVRRPTVVQGMN,;
CCDS2291.1, Del, A_7,
(SEQIDNO: 362)
EKSYVSIIIWRKPKNQKLAAKWKQRIVTLKMLGNIYWNQFQKSSI,;
CCDS7375.1, Del, A_7,
(SEQIDNO: 363)
ELKQLHHPPCSLPQKAMIIPRTVSLVLTMQKTWILQRTCLVCLKV,;
CCDS513.1, Del, A_7,
(SEQIDNO: 364)
FRRNMMKGKRMPKSAVSWRSSSSRASFLRASLQGRDSVAEQMAMC,;
CCDS14214.1, Ins, A_7,
(SEQIDNO: 365)
KPTSCTCCPLDKFSRRQKGESWRYCVICHLSGWIKPHCKSEGLCA,;
CCDS7789.1, Ins, A_7,
(SEQIDNO: 367)
RKKYQQRYNLQERFALKNLKCREKSISATMGSGQLYRRKSSSHKD,;
CCDS53388.1, Del, A_7,
(SEQIDNO: 368)
RVQIRTFFLPTHPALSFSWEPTLRTPRIQDISSAWHKYRGSKTEY,;
CCDS58928.1, Del, A_7,
(SEQIDNO: 369)
STPRSWHIQKGCMENGCSQRYDQSFLVVIFCKIQPWRSLWQTELL,;
CCDS10071.1, Del, A_7,
(SEQIDNO: 371)
DEEMKNFPLKNPLVAITTRPKSLPSFLTMHLPLALRKSTYPLSS,;
CCDS34021.1, Del, A_7,
(SEQIDNO: 372)
ENSMQVPSSQMTASSGSVFKKIAIIPMPQQYIELKKQGGSGMWP,;
CCDS43313.1, Del, A_7,
(SEQIDNO: 373)
FMYVSTVRNSLTILDILKNIFENIQVKNLLNVQIVMNDLLEIAL,;
CCDS32186.1, Del, A_7,
(SEQIDNO: 374)
GLVEAYQSARIRKKHLILLFRVLTMHHLLNLPAPFAVKWCLDMT,;
CCDS43350.1, Del, A_7,
(SEQIDNO: 375)
KPTPTTGDPDTDLVREAPISKQKKSYGSTFKKNLWIHPDCPKNN,;
CCDS31669.1, Del, A_7,
(SEQIDNO: 376)
LLKRNMKSSWMFAKIFNQFSVTSAWKNSWIQLFGLRSDWLIRAV,;
CCDS9405.1, Ins, A_7,
(SEQIDNO: 377)
LVCFTDSRSDYSNYCWKHTRHEIGSVPREKAAECHQLFPDVTCHS,;
CCDS447.1, Ins, A_7,
(SEQIDNO: 378)
NGGEENTWNLRLIFRDWEDPDGGRGEQLLLECQFPSNNSVSGTC,;
CCDS10024.2, Ins, A_7,
(SEQIDNO: 379)
NLFLPYKGREGRENAPSPRMSEQSSPFTGHKHISNPRWQSPCSR,;
CCDS4541.1, Del, A_7,
(SEQIDNO: 380)
QHSTCLPLEHFPLHLGILQSLKPVSLEILLFILEKQHTVGQQLL,;
CCDS1882.1, Del, A_7,
(SEQIDNO: 381)
RFTPQIVMRFHILLIVLLLRMKNQQQILCWTCGLVKLLFLVLPV,;
CCDS46418.1, Del, A_7,
(SEQIDNO: 382)
RKRSLNYSVRQKMSLSRTPSQQIIQMAVYKAKIIGEHHKTFTTN,;
CCDS55959.1, Ins, A_7,
(SEQIDNO: 383)
RPGHRKYLTLEHSTHLCQPCDDSARAIAHPKRSPILRTSGSCFS,;
CCDS54776.1, Del, A_7,
(SEQIDNO: 384)
SPVILKAAVIQIFKREGTMIYLLSVGTANLLRTFLVKEKLLVLT,;
CCDS10308.1, Ins, A_7,
(SEQIDNO: 386)
WDPLLDREKLLGSPVGNERVLPHRARKEHVWPGCLRLLPHPSGV,;
CCDS42354.1, Del, A_7,
(SEQIDNO: 387)
ALTPTLMTPTRWQQNLFSNSTTRPSQWDNSLSLASMKSFLAYW,;
CCDS9867.1, Del, A_7,
(SEQIDNO: 388)
CRMRWPFRWILKEKLNMMQLLDKDSQKTRSFIANTLTWFQRRL,;
CCDS7258.1, Del, A_7,
(SEQIDNO: 389)
CSPSCPMRKKVPQETRRCPRLPGVASLRLQRSLLEIRKQRQHL,;
CCDS6448.2, Del, A_7,
(SEQIDNO: 390)
DFIKIVILVLQRHFQQGKLLKKVDLKSHLGTLRKVSQNLGKRV,;
CCDS44402.1, Ins, A_7,
(SEQIDNO: 391)
DRRSYRDLGSLCSGTNSWCQGRSGVHWSSPAWRCLFPRRLHQM,;
CCDS14435.1, Del, A_7,
(SEQIDNO: 393)
ELENKMKKTQEMRKQKIKSILNQIQILKNLRSQDTDIGFCGTN,;
CCDS5952.1, Del, A_7,
(SEQIDNO: 394)
GKRTILEMTQILKVFIVKNGSMSIKKAQRKGMAIAPWEKPLIG,;
CCDS7430.1, Del, A_7,
(SEQIDNO: 395)
GQLKMTYCSKNHFRKKNMERWPINKLQQNCWIGKKQEIEGFIS,;
CCDS47878.2, Del, A_7,
(SEQIDNO: 396)
GSCKSGSRIHERGRGKASSGRWVQHSLINGVRFAEPCLKQSRP,;
CCDS2867.1, Del, A_7,
(SEQIDNO: 397)
HAPLLPPKVRYPHRCLQIDKGEKGSFAPFHFLTMKINLLHQRK,;
CCDS2895.1, Ins, A_7,
(SEQIDNO: 398)
HLWNDKPPCSREDGVDHPSDCGISLDLRVPHPSHCCARLLERV,;
CCDS46776.1, Del, A_7,
(SEQIDNO: 399)
KSQKLPTKMILQRSCLLRECIRRRHNLNTFFFVLIHILGQWSH,;
CCDS31976.1, Ins, A_7,
(SEQIDNO: 400)
LCCQYSGCVHSHDRPDPCAGERTRPPSDNRLLRRNVGSETEHQ,;
CCDS1660.1, Del, A_7,
(SEQIDNO: 401)
LKEERIHMKTFSSHNPKSLMKEKILWDRTVFLQQTMFAIRIKK,;
CCDS45430.1, Del, A_7,
(SEQIDNO: 402)
LLHQLILHQAPFQELARVLLVVLKRQSETLKLGKRCKRETPMQ,;
CCDS31206.1, Ins, A_7,
(SEQIDNO: 403)
NLCCFKWTCTVSRYKIWCNIHFITWRKSAECKSRGSVHPDKWV,;
CCDS30621.1, Ins, A_7,
(SEQIDNO: 404)
NPAEMRKEWVDGTDLWERVQWHLPALFSLLSQPRSSVSEERAR,;
CCDS53942.1, Del, A_7,
(SEQIDNO: 406)
RHFLEVEGKLNKEIIHRLDSDAEDTVLPQKEDRICKRDQIISI,;
CCDS9238.1, Del, A_7,
(SEQIDNO: 407)
RSHCLRTRNLKPCWFSKIGQTRALAMNAKRRNNRSILCLGRKV,;
CCDS9190.1, Del, A_7,
(SEQIDNO: 408)
SIRTSPWDRNGSISSQRQRPRNSKFPQCESPTANQAGEAPHSV,;
CCDS47860.1, Del, A_7,
(SEQIDNO: 410)
TSANIVIAGSTPERMSGDTWWCTLEERTSSVSIVHRDLGERIT,;
CCDS1332.1, Ins, A_7,
(SEQIDNO: 412)
YWHKQDSKATRHKWFFRFFHTAQIGRILYLSYPVRAVSRREPV,;
CCDS4814.1, Ins, A_7,
(SEQIDNO: 414)
CKSRLHQDPTACRRGVGVGFGAGIRTRGWAGSGPRPGSGAGA,;
CCDS4413.1, Del, A_7,
(SEQIDNO: 415)
CRVNAVEELHSRRMSVRIVKNWVSCCYVRLSAVGLSTWSALD,;
CCDS33361.1, Del, A_7,
(SEQIDNO: 416)
EIQLTMNDSKHKLESPALKQVSPASPPTQQPQTPQDSRQVLA,;
CCDS14466.1, Del, A_7,
(SEQIDNO: 417)
ERKVTLMINLYHLSPHLNQIMKRMCKQKRREGVKSENKQRKK,;
CCDS42016.1, Del, A_7,
(SEQIDNO: 418)
GKKWLSRNVWKLLVCQTKIIPLRRTQEDTERLPFYMEALLTL,;
CCDS788.1, Del, A_7,
(SEQIDNO: 419)
GNIVPAKKNLESVVEAKNVPTNEITVIVRTSQTNMIVEGAKV,;
CCDS12635.1, Del, A_7,
(SEQIDNO: 420)
HSNVRIVERSLYTGHTVKTNKKTTVEKIHPNVKTVGSATRGA,;
CCDS10021.1, Ins, A_7,
(SEQIDNO: 421)
KFPACGQRCGGARQSGIPSGAVFCLCLPAQGLAIRRGCGPLQ,;
CCDS46549.1, Del, A_7,
(SEQIDNO: 422)
KRRRRKRKNNPRKPKNKRKEQRRKIRKKTKNGKCHQVFFFLQ,;
CCDS34918.1, Del, A_7,
(SEQIDNO: 424)
NQVLHLISGMQSALVMLEIMKASRLKLQMHISSRSILRKQLN,;
CCDS45984.2, Del, A_7,
(SEQIDNO: 426)
PMNVSSVGKHSVFPVLFVDMKESTLQKNPMNVSSVGKHYLIL,;
CCDS45998.1, Del, A_7,
(SEQIDNO: 428)
RKRRRRRRKTTVGKTALSQCLPIAPCSSCPRPTPFAACAITS,;
CCDS2482.1, Del, A_7,
(SEQIDNO: 429)
RRRKWKWMRQRKRRKKRRKKNLSQTSSYWITQPELCLPSLRS,;
CCDS34545.1, Del, A_7,
(SEQIDNO: 430)
SETQKYLKRMTKVSTTPMKSQSQTSLWIKRLTQRRLIVSKPP,;
CCDS43426.1, Del, A_7,
(SEQIDNO: 431)
SLIKGEGQCLSVKLVETGIGNWKILKIIRNFTVLSYMDQKQR,;
CCDS8518.1, Ins, A_7,
(SEQIDNO: 432)
TPPAFPESPAAVPPTTTGGPQTQLCIYTASHEISHSTGAQQAH,;
CCDS7789.1, Ins, A_7,
(SEQIDNO: 433)
YQQRYNLQERFALKNLKCREKSISATMGSGQLYRRKSSSHKD,;
CCDS32554.1, Ins, A_7,
(SEQIDNO: 434)
GEEDKAAEKGGGRWGAKASGTEVISNSASDLGPGGCGACVL,;
CCDS53776.1, Del, A_7,
(SEQIDNO: 435)
GYRNLRKAIEKKEVWLVKRIIQTLTKRRKKKRVFRKEKTMN,;
CCDS3920.1, Del, A_7,
(SEQIDNO: 436)
KGDLKHQNTGMTIGGILESHLQRKNLKCLNINKILNLTHLG,;
CCDS45712.1, Ins, A_7,
(SEQIDNO: 437)
KQGALPCRSHHQLPGPLYLPGGPPGGLCPLSAAQARLHPLG,;
CCDS47996.1, Ins, A_7,
(SEQIDNO: 438)
LRQVLGCGPPHIWGLRGGIKSSEPRDQRGGAVGGSWRTSKS,;
CCDS748.1, Del, A_7,
(SEQIDNO: 439)
LTWNWSPLEIWSSWQRQLELTLEFRSSCHCSLCLLMLFLMI,;
CCDS47986.1, Del, A_7,
(SEQIDNO: 441)
MTSKSIRAEPRGEGKVGHSKVSQTGKVSREKRKRKGSCFLF,;
CCDS10525.1, Ins, A_7,
(SEQIDNO: 442)
NACFPEVDSGSPSRRSKRRFQWWDPGSGKVADLAVPKALCS,;
CCDS55691.1, Ins, A_7,
(SEQIDNO: 443)
NEATQELPADKWIQACPYGPELYQTHPITRSNGGQVGRKCT,;
CCDS1177.1, Ins, A_7,
(SEQIDNO: 444)
NKPGRSGSCGTCTHRKKQTDIGSKREDSCSSEKKNSKQRKD,;
CCDS34777.1, Del, A_7,
(SEQIDNO: 445)
NLSSSWFKTMRADTAFSTTRPIVRMSRSPRCWSSFARLSLW,;
CCDS58039.1, Ins, A_7,
(SEQIDNO: 446)
NNVSCYSGYTDTVLPCEGFKHQLEGEIQWKENHHHIRLFGI,;
CCDS14397.1, Ins, A_7,
(SEQIDNO: 447)
NPGTKFLYLPWPGLHSRILGLPAFQSAHYHCCWGTPSNSQD,;
CCDS2702.1, Del, A_7,
(SEQIDNO: 449)
RKVIRALIQNTVIEVQKAHQGQGADLLGVDLIPDHIQDHVV,;
CCDS35457.1, Del, A_7,
(SEQIDNO: 450)
RSIKWHCTISIQVFLRQWKCYHPKLEFGGWNALLASIYMLG,;
CCDS9081. 1, Ins, A_7,
(SEQIDNO: 452)
SSSPSTRSTSTTPELPSASPNSSSRWTESCCEQENQHAHIY,;
CCDS10932.1, Del, A_7,
(SEQIDNO: 453)
VCKSRSLFGATKTGPSPALIGARPLGIPVEGPTEGCPSQAP,;
CCDS3883.1, Del, A_7,
(SEQIDNO: 454)
VLLLWIRGTEISLCGWRSTGPLWKKPWGFLQIPTNRVKVSS,;
CCDS4289.1, Del, A_7,
(SEQIDNO: 455)
WTAAFTRSIQWWPSPAPSHTYQFVVLTTSPMGMNVTCVPRA,;
CCDS43229.1, Del, A_7,
(SEQIDNO: 456)
ARAKALAWTTRIQTRASTMTWKLRGTHHTQRPICAKYFLI,;
CCDS2716.1, Del, A_7,
(SEQIDNO: 457)
FTNVRSVGKHVVLIQRLWTIREFTLERSLMNVMSVEKLSS,;
CCDS43658.1, Del, A_7,
(SEQIDNO: 458)
GGTGTDMTTQKLMMVPNQCKLELELSLRNYALESSQVPMK,;
CCDS54415.1, Ins, A_7,
(SEQIDNO: 460)
HGGLFYQTEMGKHTRELLPGNPQHLPICLLGQKSLGKVCE,;
CCDS33370.1, Del, A_7,
(SEQIDNO: 461)
IRLKGQAQLSMVKSSVPVYQRMATIQKSSQMEWKNTKPLV,;
CCDS4999.1, Ins, A_7,
(SEQIDNO: 462)
IWPGSEDCRREAFLSVDPGQEYPHSEGLGTRRHGGRYLGL,;
CCDS42761.1, Del, A_7,
(SEQIDNO: 463)
LKKGEKRKEKRKNREKLRRKLRGEKLEKKCWIIKENKKKN,;
CCDS13692.1, Del, A_7,
(SEQIDNO: 464)
LLRTGQFRGFGLILLHQESHSHRRASSPCRKELLSPSPRP,;
CCDS2981.1, Del, A_7,
(SEQIDNO: 465)
LMSALSATRLSPPNRTTSSTCSYTQVRSPTNAASVGAPSP,;
CCDS46164.1, Del, A_7,
(SEQIDNO: 466)
MREFILGRNRTDVMNVVRTSLEIQTWQIITESILERNRTD,;
CCDS1691.1, Ins, A_7,
(SEQIDNO: 467)
NDGQRHEAPPQELIFSYLIFNTNGCKTGICYGRGTTKAES,;
CCDS1290.1, Del, A_7,
(SEQIDNO: 468)
RESSEGIGQPSIAASCRLWSVSLSGHTILMLLCEKTLPAG,;
CCDS31906.1, Del, A_7,
(SEQIDNO: 469)
SRIYPRCLRMPWSCLRCMPGNRGAEKTTLTLLKASEPYWS,;
CCDS59076.1, Del, A_7,
(SEQIDNO: 470)
TTTTSLKEEEGIILITESRSLALLFQSLMILICAGTKEPF,;
CCDS3843.1, Del, A_7,
(SEQIDNO: 472)
WCLARALKRICLQRIKKKTFLWRKVIILRIPRHFIQWKKN,;
CCDS10550.1, Del, A_7,
(SEQIDNO: 473)
YVQDQQKQIMKDHIIYVKMLLLRRNVDIQATARLLIAKRR,;
CCDS47907.1, Del, A_7,
(SEQIDNO: 474)
AFFANQEISIVKTIVVCLKVGCVILKMTVVMAAMKKIAQ,;
CCDS9400.1, Del, A_7,
(SEQIDNO: 475)
DRKRKALKKNVKNPKVILIFLMKKQPSKVRRKEAHGLPL,;
CCDS41508.1, Del, A_7,
(SEQIDNO: 476)
DTEIFFHFNIMDIVAQMREQRSGMVQTKEQYHFCYDIVL,;
CCDS3422.1, Ins, A_7,
(SEQIDNO: 477)
EDGCVGKALWKWGSGGLAERSPVCFWAELGTPIDGDASQ,;
CCDS46557.1, Del, A_7,
(SEQIDNO: 478)
FWRRRKIMRNCSSHPNLGRRSDLSLSRHGRRRRTSFPRR,;
CCDS3411.2, Del, A_7,
(SEQIDNO: 479)
IQGMLKRTPKRNSNMKKIPKKPLKQVSIVKRKKFLLQRS,;
CCDS5776.1, Del, A_7,
(SEQIDNO: 480)
LFASQMPMYQEAIKVVYKNSARFRSDVWREHLCLTADPV,;
CCDS44379.1, Del, A_7,
(SEQIDNO: 481)
LPYLPAKISSPHQKQRLKKAYFQMRRTLRICFLLKVRVS,;
CCDS53528.1, Del, A_7,
(SEQIDNO: 482)
LPYLTAKISSPHQKQRLKKAYFQMRRTLRICFLLKVRVT,;
CCDS2397.1, Del, A_7,
(SEQIDNO: 483)
MQVLSKTHMNLFPQVLLQMFLRGLKRLLQDLEKSKKRKL,;
CCDS33592.1, Ins, A_7,
(SEQIDNO: 484)
NGSRAAVPVCGRPAERQCFPHKSAQHGDPGEAGAEQSRV,;
CCDS46450.1, Ins, A_7,
(SEQIDNO: 485)
NYPRVCVSLPVSCDVCHICKISSKSCCWWYIFRPNCALG,;
CCDS32792.2, Del, A_7,
(SEQIDNO: 486)
QKLVDMKVHWKTFQGLVCLILGIYLCPKNKLLKTFIRWT,;
CCDS8438.1, Del, A_7,
(SEQIDNO: 487)
QPMLGKKKVYLKSHCWKYCRTDTKGKNRLWLLSKSFTSY,;
CCDS47859.1, Ins, A_7,
(SEQIDNO: 488)
RRLHPQQLCGQTQHLRNRRVVFQGYNQEGRRKAAFGTRK,;
CCDS46038.1, Del, A_7,
(SEQIDNO: 489)
SACTAQSLSHYTLTSAETVLTLYLPRSGTMQLFSTFRTF,;
CCDS7354.1, Del, A_7,
(SEQIDNO: 490)
SLRGSLRRSRKPEINMASMITAQQSPVCCTSWTASPPPK,;
CCDS164.1, Del, A_7,
(SEQIDNO: 491)
SNWTDLILLPAPKTVRSLPVFLLGLAQGPAQTYKQDWEN,;
CCDS56589.1, Ins, A_7,
(SEQIDNO: 492)
TPETISDQQPEISQARNERGHCECAAECPGENQGQDAKR,;
CCDS58199.1, Ins, A_7,
(SEQIDNO: 493)
TPPAFPESPAAVPPTTTGGPQTQLCIYTASHEISHSTGIT,;
CCDS727.1, Del, A_7,
(SEQIDNO: 494)
VRNTEMDTEWHLHVHFVNFEHLKKKILNCIWKVLHIRKH,;
CCDS8341.1, Ins, A_7,
(SEQIDNO: 495)
ADTFFFPDELQIVICFPVLIQEIWKGDFKASITGTERM,;
CCDS35348.1, Del, A_7,
(SEQIDNO: 496)
AMMYPPRKKNVSTGKRKRNLLKKGQKRKCFGMSLFLDF,;
CCDS4124.1, Ins, A_7,
(SEQIDNO: 497)
DSDLLCCLPRDWTPVVWKLGYHELVEQYLAQRGFCILF,;
CCDS55350.1, Del, A_7,
(SEQIDNO: 498)
EAMFSSRLRGLIPPKNGFWNWNLTWPRKTTFFWNRRNI,;
CCDS1508.1, Del, A_7,
(SEQIDNO: 500)
ELLLREVGRSRPRRLTSSMRNMRAWSKKTPCCGERSGS,;
CCDS2635.1, Del, A_7,
(SEQIDNO: 501)
EPWRYHLPKKQFLFYIMFENLFRDSQTVGNVNLKPTSA,;
CCDS55048.1, Del, A_7,
(SEQIDNO: 502)
GGRMLLEMMKRLVRKNLKKTMMILKTSLKMSFQKMRKR,;
CCDS7433.1, Ins, A_7,
(SEQIDNO: 503)
IYDFQRKEKISIKNAEKVEESRRETRARASRGRSFREY,;
CCDS53355.1, Ins, A_7,
(SEQIDNO: 504)
KKGKKIKEGKKKGKKRRGRRSKPTMPQAQRRADGSGRA,;
CCDS46430.1, Del, A_7,
(SEQIDNO: 505)
KPLMPIKSRQKKKKKKKQDQSTKRLRNPFSVFLKIMRK,;
CCDS46811.1, Ins, A_7,
(SEQIDNO: 506)
NKMDEHESRFWPPLLSRLGQPLCHARPREGRPVPVCGL,;
CCDS54695.1, Ins, A_7,
(SEQIDNO: 507)
NLPYCQLSTTGNDLTDEKASRFFTFPIITNRGNKRRNN,;
CCDS34357.1, Ins, A_7,
(SEQIDNO: 508)
NPQWGEASRVQGLWEGLQDQEPSLYASAYPHRGEALQM,;
CCDS13115.2, Ins, A_7,
(SEQIDNO: 510)
NWSGGRGISSHSPRRSSGSVLCFSGTYPGDVRHGFRSS,;
CCDS13085.1, Del, A_7,
(SEQIDNO: 511)
TDASATYPSAQPLWATHGKASGRATTAGVQMKTPRPRD,;
CCDS34195.1, Del, A_7,
(SEQIDNO: 512)
THTRWGITTWDSWSVRMKANWIQAQQNKSLILSPSFTK,;
CCDS4306.1, Del, A_7,
(SEQIDNO: 513)
TKKKKKRRRKQKRPQPKILSHRPRRKRRKRRRQQSRLY,;
CCDS5283.1, Ins, A_7,
(SEQIDNO: 516)
WRLHAHEVSAAPVQARVVLELWLRVEPRLHGGPLVRRV,;
CCDS44334.1, Ins, A_7,
(SEQIDNO: 517)
ACKSPSTQELSKASKFCSTRTSSNACKSSTYSEYRSN,;
CCDS31735.1, Del, A_7,
(SEQIDNO: 518)
AGNFAIMEIQCPALRKTLPILFGSLRRQNMSLEMWCR,;
CCDS3322.1, Del, A_7,
(SEQIDNO: 519)
DLNFFRVGRLLLRSVFHNRKTTVTVESLCSSTASASP,;
CCDS34204.1, Del, A_7,
(SEQIDNO: 520)
DRLIHLRRMMMKKIMIMIKEVLVAKQLLMLAIRRMKK,;
CCDS6264.1, Del, A_7,
(SEQIDNO: 521)
EERRSPRNISMKLGIVGHLYYLGGSVLALSLKHLTKK,;
CCDS44157.1, Ins, A_7,
(SEQIDNO: 522)
GVVHHSPAGRHHASLSGRQSQAAELRVEQCHTTKEVY,;
CCDS1763.1, Del, A_7,
(SEQIDNO: 523)
IRTAPDGMEMKWPKEQRLISKPLSLSSRRQHLPMESS,;
CCDS9379.1, Del, A_7,
(SEQIDNO: 524)
KKLMSLFVKDFVMMSRVMSVGMYMDSCSVLIKNMMKL,;
CCDS11984.1, Del, A_7,
(SEQIDNO: 525)
LKNPDKRLTSGLNVNPKVKSRNSSARTLLMLRLCWYW,;
CCDS30955.1, Del, A_7,
(SEQIDNO: 526)
LWRNIKTNVSSSLSIRAILKKIHLQQRLLNAGKNTMR,;
CCDS14401.1, Del, A_7,
(SEQIDNO: 527)
NLGRIHLLNSGGVHSPLLKCVVKFRSQKILLQSRLKA,;
CCDS47324.1, Del, A_7,
(SEQIDNO: 528)
NLGRIHLLNSGSVHSPFLRCMVKFWSQKIVLQNRLKA,;
CCDS42411.1, Del, A_7,
(SEQIDNO: 529)
SKMINQPRKSMCQKRGTLKRNETRLKRKARNLLGRKK,;
CCDS9270.1, Ins, A_7,
(SEQIDNO: 530)
SYQISEQGKKEKVDNYCCVSGSGCHNRSNYWLVSWQM,;
CCDS6316.2, Del, A_7,
(SEQIDNO: 531)
TGGVIHFQPVMHYVEEMLEGLVEQSYHLVTRNFIQIL,;
CCDS150.1, Del, A_7,
(SEQIDNO: 532)
DLRLRIMYTCGRCITQIWDGCALMPLIQRRETGCDM,;
CCDS44878.1, Ins, A_7,
(SEQIDNO: 533)
GMAPDEGGKARTTEPETVAGRRDVEGRAKTGNSKAG,;
CCDS48007.1, Ins, A_7,
(SEQIDNO: 534)
GNRAADAADRKPEGDRSSQGPAHQSAGKALRAPRNL,;
CCDS1899.1, Del, A_7,
(SEQIDNO: 535)
GSPTPPQLLFGKMPCHWEPFPSILGISLISCKLNKS,;
CCDS6342.1, Del, A_7,
(SEQIDNO: 536)
HLSSCTCLRVHLSGHSGHHQKSMTSWPKKAGLLEQT,;
CCDS43349.1, Ins, A_7,
(SEQIDNO: 537)
ICLQRKKAVLCWKRQKTKSFGNCFRRGKKESLKRMP,;
CCDS6082.1, Ins, A_7,
(SEQIDNO: 538)
KYHGTVTRKSLQFLTACYFGTRAGDSDCVIWQIGRS,;
CCDS47226.1, Del, A_7,
(SEQIDNO: 539)
LIGFLKIKRSKLLVAKMFLCFSSELWGKFYIVKEHL,;
CCDS8243.1, Del, A_7,
(SEQIDNO: 540)
LMKLLSRNKNIKKPTIAMLRTPAKKRVKGKMRTFYL,;
CCDS53846.1, Del, A_7,
(SEQIDNO: 541)
LPNQAKSGLWPITELKIQMRGILGEMSRLPILPRVP,;
CCDS4597.1, Del, A_7,
(SEQIDNO: 542)
LPRVQLRPKPLSPRRPSLSRGSRRLQRQRRQLRRKS,;
CCDS702.1, Del, A_7,
(SEQIDNO: 543)
LSRNILEMSFCLFMTKTSNMDLTFILLQLKRAKKTI,;
CCDS32797.1, Del, A_7,
(SEQIDNO: 544)
LTTLMNVVKLLTHSQSLLNIKEFILERAHKDVIKNV,;
CCDS13443.1, Ins, A_7,
(SEQIDNO: 545)
NCFRYQQRADRLSTRRNAVLEGGLPAVVQLETKISP,;
CCDS46943.1, Ins, A_7,
(SEQIDNO: 546)
NDIPTSVIQRLHHQRESQIVTLGSPLPCIYPIFFQI,;
CCDS5773.1, Del, A_7,
(SEQIDNO: 547)
NLLNRLESLGKKGRILFSIQSTLYENFPLCKRLPYK,;
CCDS41814.1, Del, A_7,
(SEQIDNO: 548)
NLLRYKRKITEKKRKEPQRSCSVQSQILLLLLWLIG,;
CCDS3751.1, Ins, A_7,
(SEQIDNO: 549)
NRHMYTTNKRSTRARRKGRESSPGKTNGPGRGKKAK,;
CCDS33215.1, Del, A_7,
(SEQIDNO: 550)
PPSLTSMQDHALLPQFLTINMATLHPGCSPEEPALS,;
CCDS14180.2, Del, A_7,
(SEQIDNO: 551)
PSKEWTMRINSRKHSLPRCHPSPPLLLPRLITRGCP,;
CCDS3572.1, Del, A_7,
(SEQIDNO: 552)
QELQESEKPEVVVMIAGILGAMIEVPVVHVELWVVE,;
CCDS9600.1, Ins, A_7,
(SEQIDNO: 553)
QGSSQRDCCGPVPEVLPQAHGHSLLLLRNCRYWGQW,;
CCDS3352.1, Del, A_7,
(SEQIDNO: 554)
QKIATSCFRHQKLPEDRLFFVCHRKKMCHPRTWPKL,;
CCDS35339.1, Del, A_7,
(SEQIDNO: 555)
QLLFMTLNYRLQRPYRKLLMTWALMLLSIILTLSLF,;
CCDS55946.1, Del, A_7,
(SEQIDNO: 556)
RAYKVCTIRYVALKLKLRDKRKCFEIMNPKSFIYSE,;
CCDS3205.1, Ins, A_7,
(SEQIDNO: 557)
RKQRRIKTCFRWFLAACKTHSFLYGPYLQSREKKTN,;
CCDS9269.1, Ins, A_7,
(SEQIDNO: 561)
SYQISEQGKKEIDVHYYLCNCFACDPWNYPSNNIVL,;
CCDS1802.1, Del, A_7,
(SEQIDNO: 562)
VTMAMPSSQTALPPLHHLLLKHLLLTAQEGICHHHH,;
CCDS2474.1, Del, A_7,
(SEQIDNO: 563)
ASQEGQPHLDTESKRSSKGWIRFLKRKMTQLVTPR,;
CCDS6192.1, Del, A_7,
(SEQIDNO: 564)
CRKWFLLFRLQWTGTFGIKVQSSHHLIFLKGKQKL,;
CCDS12934.1, Ins, A_7,
(SEQIDNO: 565)
DASRILSPYCIRKTGYAKTLFYVAASKTHKALRIQ,;
CCDS10137.1, Del, A_7,
(SEQIDNO: 567)
DLISSNSRIISIQYLDLETSKKLSKKLKDSLKALN,;
CCDS56401.1, Del, A_7,
(SEQIDNO: 568)
FCQGKRKLNKRKKKLHSNFKKNCDGEEHSYMLMST,;
CCDS9681.1, Del, A_7,
(SEQIDNO: 569)
FLILLNKAPVQGHHQIHSKFPVLTSQPQRLYQKTQ,;
CCDS1304.1, Ins, A_7,
(SEQIDNO: 570)
GAEESGPFNRQVQLKVHASGMGRHLWNCPAFWSEV,;
CCDS53790.1, Del, A_7,
(SEQIDNO: 571)
GELSSEVEDDEKMTGSQDLILQQLNQRLQHQSLTY,;
CCDS43379.1, Del, A_7,
(SEQIDNO: 572)
GRETIIKTLTQRKKLPWKLKLKLPEKGPLSLWRLE,;
CCDS47683.1, Del, A_7,
(SEQIDNO: 573)
GSHSLRLPPPPPPPPLPCRHPSRLHCQGLTKRTVF,;
CCDS43614.1, Ins, A_7,
(SEQIDNO: 574)
HDSREDCRVPTYHPHICSYWRRNRRIKELYKKVTG,;
CCDS6254.1, Del, A_7,
(SEQIDNO: 575)
IGMWIKSIGEYGSVHMYLQYALLPMWDCCLVLFVP,;
CCDS32029.1, Ins, A_7,
(SEQIDNO: 576)
IITWALQGAVHIVCPHHCGHSVLWTLYFYLCLAIQ,;
CCDS43157.1, Del, A_7,
(SEQIDNO: 577)
KKGMKNQPSLMGQGSQMHFPSSKQKIVITCFPRWT,;
CCDS9247.1, Del, A_7,
(SEQIDNO: 578)
LKEKRNRIANLRISTLSEGAPGRAKPSCSLKKGKE,;
CCDS55686.1, Del, A_7,
(SEQIDNO: 579)
LKSHFSSRYPSVYPVLIFRLQKGHCTSGITNIFLV,;
CCDS54577.1, Del, A_7,
(SEQIDNO: 580)
LSKCGTVRTGTLWLFSPCHSPVIAWKPILQRMAHS,;
CCDS45069.1, Ins, A_7,
(SEQIDNO: 581)
NHLGPGGLSAGVAEGWGGPLQAAGAPAPRDHRENV,;
CCDS8327.1, Del, A_7,
(SEQIDNO: 582)
NITMLKLKTKFGSWQTLCKRSNVWQDKCFFKPFLT,;
CCDS30621.1, Ins, A_7,
(SEQIDNO: 583)
NNSFLGYPFCQPASQGPETNTDGFFPTSQDGCNLN,;
CCDS12991.1, Ins, A_7,
(SEQIDNO: 584)
NYKATSSKASNTCTDSSRLCYNNRKFPKPEDTVYI,;
CCDS11772.1, Ins, A_7,
(SEQIDNO: 585)
PGSRCPGSEGKHAEPGWRSHRVLPRHIALSSFPIQS,;
CCDS43327.1, Ins, A_7,
(SEQIDNO: 586)
PLIPDLPIDCCPYKQGQGHPPIPRDHSRDQSISLL,;
CCDS43919.1, Del, A_7,
(SEQIDNO: 587)
PSKEWTMRINRKHSLPRCHPSPPLLLPRLITRGCP,;
CCDS30769.2, Del, A_7,
(SEQIDNO: 588)
QILQIIKKWIFLLETVNVKRKLISVCIILMMKLMK,;
CCDS46368.1, Del, A_7,
(SEQIDNO: 589)
QRLQTFILILDYSVGIIAMLACLFYPNLNPKCSLV,;
CCDS31816.1, Ins, A_7,
(SEQIDNO: 590)
SIFYMFFPHGGRVHFLWQLHLHVCETLSKRKSVIK,;
CCDS8438.1, Del, A_7,
(SEQIDNO: 592)
SSLWDYPPRKRTLIFNFTIKKEGNLIQNRSPTPSE,;
CCDS59367.1, Del, A_7,
(SEQIDNO: 593)
TIKVWMSVRCTEEVIMDLTNVCQLPRAKYFYLINV,;
CCDS1336.1, Ins, A_7,
(SEQIDNO: 594)
VKTTTGKNQLTDRQFTKSLCKGHSQSTTTNQKNQG,;
CCDS32097.1, Del, A_7,
(SEQIDNO: 595)
PCPNYLLQKNVCQDALGGVLPVIAVDLALAVKNY,;
CCDS46941.1, Del, A_7,
(SEQIDNO: 596)
VSEKMEFSTLVWIIHVHYSGAFRRKKLFCLHMEIV,;
CCDS13996.1, Del, A_7,
(SEQIDNO: 597)
WSKTRQQPLGTARRRGRSRRLLLVSAKSWKRRTRL,;
CCDS53903.1, Del, A_7,
(SEQIDNO: 598)
ALKPINTSIYILRASSLWGAAWWSPRKSLACPMP,;
CCDS3960.1, Del, A_7,
(SEQIDNO: 599)
DGAMTLKRGRFQNPSPSLMVQTFLGTKEQEYPQN,;
CCDS41745.1, Ins, A_7,
(SEQIDNO: 600)
DYKRAGSYNIGVCEKKYARGRDSLELLPKELEVI,;
CCDS3920.1, Del, A_7,
(SEQIDNO: 601)
ENKILTHRRLGVLQEVIDQLLRRRVLREMGQGQH,;
CCDS42450.1, Del, A_7,
(SEQIDNO: 602)
ETWVNFHGQPQRTTKCSERQMRTRTMGPPLRTQR,;
CCDS34743.1, Del, A_7,
(SEQIDNO: 603)
FEKQLQTFWAVDKGNLRKDEIPQMVLIYPWLQLI,;
CCDS255.1, Ins, A_7,
(SEQIDNO: 604)
FQKRKGEGEDPTTISVTLQIKIPDAVPLSFSHST,;
CCDS6353.1, Del, A_7,
(SEQIDNO: 605)
GEVISSLSWTVLSKMSMISISYWKKQKSRLSGRL,;
CCDS11672.1, Del, A_7,
(SEQIDNO: 606)
GSVKRVWSRNVASRMPLSCQLCSSSTKSSSEPRS,;
CCDS42772.1, Ins, A_7,
(SEQIDNO: 607)
HGGLFYQTEMGKHTRELLPEHSGAGEGKNSTFMQ,;
CCDS41619.1, Del, A_7,
(SEQIDNO: 608)
HGRILALSFWIIIFMKKILIFPATGRFSLKFLMG,;
CCDS5659.1, Del, A_7,
(SEQIDNO: 609)
HKRTRPLLSRPPGSQRTWTASNWCPWFRKPSPPS,;
CCDS2221.2, Ins, A_7,
(SEQIDNO: 610)
ICREVFRHFGRSCGPTRTQQLFGHTIRTSERSEK,;
CCDS4987.1, Ins, A_7,
(SEQIDNO: 611)
KDLKTPAKIRKLYLCILYTYTINTAKTQCCSDKR,;
CCDS8438.1, Ins, A_7,
(SEQIDNO: 612)
KRGISSRTDLLPRQSNRQDVYSECQGNGKCCHRS,;
CCDS53826.1, Ins, A_7,
(SEQIDNO: 613)
KTSSHQTGSPLAWGPGSEGNPKEKVGRADYQKVH,;
CCDS45050.1, Ins, A_7,
(SEQIDNO: 614)
LCCCPRNFYRRTKIRYRDGVSSCWPGWSPTLDLK,;
CCDS44737.1, Del, A_7,
(SEQIDNO: 615)
LSLLFPWASISDPFPLMFLSEGPSMSTKPFSIFF,;
CCDS3873.1, Del, A_7,
(SEQIDNO: 616)
MVIKGCQKKYWRIASFKLYAFSLKRSPHSCQTLV,;
CCDS54624.1, Del, A_7,
(SEQIDNO: 618)
NGRNYTRVNLVMTMKIPKIFKPSKKPRCIWEISI,;
CCDS43472.1, Ins, A_7,
(SEQIDNO: 619)
NKRSCREKKRMSACSWCLQAGMQQLGICILLLQC,;
CCDS1629.2, Ins, A_7,
(SEQIDNO: 620)
NRGSCTAERISFGFIFSVCHLTSCFKEQTKKHIQ,;
CCDS3928.1, Ins, A_7,
(SEQIDNO: 621)
NRILSGTCSFRQPSRAGGYIDIPLLHSELERLLY,;
CCDS1404.1, Ins, A_7,
(SEQIDNO: 622)
NTGGNGEIRCQQLLNLVPGFRMPVQIFIHLLPRN,;
CCDS42626.1, Ins, A_7,
(SEQIDNO: 623)
NTKISQVWWCIPILPATQGAEVGEWLEPGRQRLQ,;
CCDS55466.1, Del, A_7,
(SEQIDNO: 624)
PFIKQQTFLRCLCALLMVISTFLQKNQLPLLILI,;
CCDS33750.1, Del, A_7,
(SEQIDNO: 625)
QRQLLQPESLNLMQSLKQPAQLQVHRNNLRGKSR,;
CCDS14032.1, Del, A_7,
(SEQIDNO: 627)
RGKGGREGSLGPSRGSEKPNKQFPLWNPKNLRSN,;
CCDS1387.1, Ins, A_7,
(SEQIDNO: 628)
RKLQSWRRVEILLQKKSYKSWIRLSSMLPIWVVT,;
CCDS765.1, Del, A_7,
(SEQIDNO: 629)
SQRSGTLWLALLLHSVVTTGVIGDIMWAKNISGL,;
CCDS54564.1, Del, A_7,
(SEQIDNO: 630)
STIRRLQSWLKNTRQNWKALSISRMPFGLKNSKS,;
CCDS53687.1, Ins, A_7,
(SEQIDNO: 631)
TAFRPICKGLFATRQRQNGQEENTRSEENLESCV,;
CCDS4012.1, Ins, A_7,
(SEQIDNO: 632)
TSCFKTKSTQEGRVCQERFCCCRKAKGEGENKSH,;
CCDS7805.1, Ins, A_7,
(SEQIDNO: 633)
TTSTKSREEKGSQARTSASINEGKNKIQSHNFIK,;
CCDS7352.1, Del, A_7,
(SEQIDNO: 634)
VAANGLKMSSRQHYHQKKSNGMEACGTHPTPRLS,;
CCDS54956.1, Del, A_7,
(SEQIDNO: 635)
WRRKHGQAELRDARKHAVEVTLDPETAHPKLCVS,;
CCDS55692.1, Del, A_7,
(SEQIDNO: 636)
AKINVELPWWKIFLKALTIQKMHEIFTYHFSKAG,;
CCDS8436.1, Del, A_7,
(SEQIDNO: 637)
CPLLLVYIMSTTGWLERAYGRLWRPTAIRQTLY,;
CCDS59119.1, Ins, A_7,
(SEQIDNO: 638)
EQLPVSDGPTVWLPRTGVHPKYKQIINTSNFCF,;
CCDS43328.1, Del, A_7,
(SEQIDNO: 639)
ESPLICFHLQVLLLLNLRILAAQQLRFLVISPY,;
CCDS3123.1, Del, A_7,
(SEQIDNO: 640)
GLQTKRTLRIRKPRVLKPLQFRLASQILPTLSK,;
CCDS42650.1, Del, A_7,
(SEQIDNO: 641)
HVVSHLLSSSFLSLAALYLELLFWLYLELTQSI,;
CCDS43515.1, Ins, A_7,
(SEQIDNO: 643)
ISGRSRKERKAAGRLQGGGVADARLERDQPCSS,;
CCDS35337.1, Del, A_7,
(SEQIDNO: 644)
LACQHLMIHLVKLVPTTKCQNQERKVHPARVGL,;
CCDS33716.1, Del, A_7,
(SEQIDNO: 645)
LFPKKKCTNLSVPMMLTILIWKRVFILLLSDKK,;
CCDS47878.2, Ins, A_7,
(SEQIDNO: 648)
NQRGGIRGHQTRKTPQKRGKNLICSFSVGQSCR,;
CCDS33318.1, Ins, A_7,
(SEQIDNO: 649)
NTCFPRVIGYKYASSKSYLSILLESVSISTHQL,;
CCDS5731.1, Del, A_7,
(SEQIDNO: 650)
PALSSLMKLMLLEGLVLMMVLEVTMKCREQCWN,;
CCDS33125.1, Del, A_7,
(SEQIDNO: 652)
PILDKNLMDVLNAVKPSLTGHTLLGTRKEFTPD,;
CCDS9719.1, Del, A_7,
(SEQIDNO: 653)
QTEVCWKRWDSLKVKLSHRKRTARTVLFARMGL,;
CCDS10137.1, Ins, A_7,
(SEQIDNO: 654)
QTRKRTSGKAARGTERETEEGRTRTKSQKETRS,;
CCDS5944.1, Del, A_7,
(SEQIDNO: 656)
SLKKSSQKSATASCAHTTPTLKSSLQKSISAWP,;
CCDS55053.1, Ins, A_7,
(SEQIDNO: 657)
TCRSRTTQGKKTGKERKTCGTSKVTKERTLSSK,;
CCDS56504.1, Del, A_7,
(SEQIDNO: 659)
TPMTPLRRFLDQGCSTTCSQMNSFEMYLNLDPQ,;
CCDS34171.1, Del, A_7,
(SEQIDNO: 660)
VNQKKGNITKRKKRREKRKSILLHLIVLNSPES,;
CCDS4993.1, Ins, A_7,
(SEQIDNO: 662)
AAAFRGGKEEFISIYGINCPRIIFRFTWAFTE,;
CCDS32238.1, Ins, A_7,
(SEQIDNO: 663)
AAAGVGFYCRRNHNRRLCLNHKWPQFGSCPRK,;
CCDS11195.2, Ins, A_7,
(SEQIDNO: 664)
AERLGLHQDSATHRNGDPEESQRQRLLLISGN,;
CCDS53552.1, Ins, A_7,
(SEQIDNO: 665)
CYSSLSRGSLQNWTRNAEHFKKSCSYFASASK,;
CCDS556.1, Ins, A_7,
(SEQIDNO: 666)
DPGVCDLYDGLCLWGPNSISAVHAHLSPGLYR,;
CCDS47865.1, Ins, A_7,
(SEQIDNO: 667)
EKEKVKGKKRPEGTERTQGEKRAQGTQDPESP,;
CCDS43993.1, Ins, A_7,
(SEQIDNO: 668)
EKKERKRESRPGGTGRATILFVTQTQDSKGKG,;
CCDS46441.1, Del, A_7,
(SEQIDNO: 670)
FILEVQLKETVVTHLLEYSTLLVISSYPSWLW,;
CCDS8552.1, Ins, A_7,
(SEQIDNO: 671)
GAYALMPAAGGQLWGGARVCGGGGRGGSALRQ,;
CCDS5974.1, Del, A_7,
(SEQIDNO: 672)
HSLWKSLISNNRSLMKQHCTVLWPLCIPNVNK,;
CCDS47573.1, Del, A_7,
(SEQIDNO: 673)
IIHKNSLPPPTPKDVENPANLLTLLVAKILAG,;
CCDS43209.1, Ins, A_7,
(SEQIDNO: 674)
IWDGKECSDITGFPGGINWDSFSRKAKSVFGM,;
CCDS44612.1, Del, A_7,
(SEQIDNO: 675)
IYRKSGTHQMRTAPSVWNASRPPQATRARSLR,;
CCDS55053.1, Del, A_7,
(SEQIDNO: 676)
KYTKIRLKNKRNLKGKYKLKLHTKKKKKEKKK,;
CCDS5091.2, Ins, A_7,
(SEQIDNO: 678)
NCDYALQMCPKSTTGSSVASSQRRIRTFQETA,;
CCDS11827.1, Ins, A_7,
(SEQIDNO: 680)
NGFGGYFRTIECNDNRKQEKCENSERRSSKAG,;
CCDS12504.1, Ins, A_7,
(SEQIDNO: 681)
NLQAACTPCSSPENSHWGVTVTTQPSQSPSPI,;
CCDS31873.1, Ins, A_7,
(SEQIDNO: 682)
NMDGTNNNCNFLLYQESGNQENIFIHIARRIL,;
CCDS45246.1, Ins, A_7,
(SEQIDNO: 684)
NQAHHLRFGQSKQQQGAGCGPGVRGGQRQNKP,;
CCDS45823.1, Ins, A_7,
(SEQIDNO: 685)
NSFVCYRPENPEHSRGHPTVLFCNLLCGGFES,;
CCDS55457.1, Del, A_7,
(SEQIDNO: 686)
PRENCRKPWNLNQSAGSKWSRHLSKPPLVTVA,;
CCDS53435.1, Del, A_7,
(SEQIDNO: 687)
QRKVLLQAGRDQKPSYCPEEPQLFLSEHPLGI,;
CCDS53348.1, Del, A_7,
(SEQIDNO: 688)
REDILKACKQMQMIIFLITRMEWKKYLVPSIP,;
CCDS33425.1, Ins, A_7,
(SEQIDNO: 689)
RPGSERKKRVPGPRQEDIRGRHTKEKEAQRRV,;
CCDS44154.2, Del, A_7,
(SEQIDNO: 690)
RRMDSSHLSLIIPSLYGWYQLCVSSMKLLAHS,;
CCDS3422.1, Del, A_7,
(SEQIDNO: 691)
RWLCRQSSMEVGIRRPGRKESCLLLGRTWHAN,;
CCDS33332.1, Ins, A_7,
(SEQIDNO: 692)
SEITKIMGWKINSVFLSSLSVYMLNCIFVVSS,;
CCDS3892.1, Del, A_7,
(SEQIDNO: 693)
SGEILFQKRYLFLGGLLQLQITRTSGISLMKG,;
CCDS1575.1, Del, A_7,
(SEQIDNO: 694)
SKRSLMQPSSLAFNTRTLSNSQRSLKAGLQIK,;
CCDS32064.1, Del, A_7,
(SEQIDNO: 695)
TKGKELDMNFRKFQLTSHFLEDGVVISLAKPQ,;
CCDS92.1, Del, A_7,
(SEQIDNO: 696)
VVKTVALGHLTIRNVASVDPGQTVLWMESLCL,;
CCDS47253.2, Ins, A_7,
(SEQIDNO: 697)
YFILGQISTSRIKGNKYFKSFGIFLFKNVREL,;
CCDS53355.1, Del, A_7,
(SEQIDNO: 698)
EGEEDQRRKEEGEEKKGKKIKTHHAPGSTAC,;
CCDS8523.2, Del, A_7,
(SEQIDNO: 699)
EVCLRLMNKCCFMVPAVNLWKQSAFITLIGE,;
CCDS6281.1, Del, A_7,
(SEQIDNO: 700)
FPPSAQFIMSCIIRFPVIRTARPKTYFQAYF,;
CCDS55354.1, Del, A_7,
(SEQIDNO: 701)
GTMKTSTNCPMTTSADPRQRRCCSLTQGPRT,;
CCDS55323.1, Del, A_7,
(SEQIDNO: 702)
HLWISLIFFMNSVNLSSPKARDWTVSELLKN,;
CCDS55242.1, Ins, A_7,
(SEQIDNO: 703)
IETWCQRICKTSNDLQWCVFTMFFNPIYCWM,;
CCDS8579.1, Ins, A_7,
(SEQIDNO: 705)
IYVRKRFSPIHELLHHLVLVLESLLGMLPGY,;
CCDS53507.1, Del, A_7,
(SEQIDNO: 706)
KIQSLQTVVKVKSYQKILLLSLRRTKALKGG,;
CCDS33493.1, Ins, A_7,
(SEQIDNO: 707)
KKCFPQQRLCIQYLNGTRGGAYEICVQSAES,;
CCDS34633.1, Del, A_7,
(SEQIDNO: 708)
KLVTSFCKKLPCRAISYMRSSLTLASELRPG,;
CCDS659.1, Ins, A_7,
(SEQIDNO: 709)
KTNKITVTRKTPQVIIWIIPFWFPFKFKKEI,;
CCDS33830.1, Del, A_7,
(SEQIDNO: 712)
MTTKRLNKMVSNQKIKLIRPQPKFRLASVDT,;
CCDS4138.1, Ins, A_7,
(SEQIDNO: 713)
NGIKGRGKWARSSQKETTCQRQAREQTRNEL,;
CCDS34872.1, Ins, A_7,
(SEQIDNO: 714)
NKRPAHHRRWSETFWGYCVQVLWYDIYCFQP,;
CCDS32404.1, Ins, A_7,
(SEQIDNO: 715)
NSDNVAGPAEPGAAEAGDYGGGIWARVKGEQ,;
CCDS47904.1, Del, A_7,
(SEQIDNO: 716)
NVSCLERKRIKPQNFVKHLKSVGKNVYLAEG,;
CCDS43689.1, Del, A_7,
(SEQIDNO: 717)
PEQLTLPISQQKPSPVLGKLEMVKAVQLRVA,;
CCDS12504.1, Del, A_7,
(SEQIDNO: 718)
PSGSMHTLLITREFTLGSHCHHPTQSITKSY,;
CCDS6795.1 Del, A_7,
(SEQIDNO: 719)
QTRKSKTRAGMRTMMKTKKGWKKKNRMKRKK,;
CCDS56279.1, Del, A_7,
(SEQIDNO: 720)
QVNYQSVKLQAFSNLKIPLLCCFWLLQSSVF,;
CCDS33213.1, Del, A_7,
(SEQIDNO: 721)
RVKTTFLNCCLQKSLLKFSVSWTFGVCAGLH,;
CCDS3450.1, Del, A_7,
(SEQIDNO: 722)
SKEKEKLVHLKRNQNLKRAGRLPKGTVWQRQ,;
CCDS3993.1, Del, A_7,
(SEQIDNO: 723)
SRLPHQSPGHLGLFLLHQVLRKLKQMLNNKL,;
CCDS8439.1, Del, A_7,
(SEQIDNO: 724)
SSLWDYPPRKRTLIFNFTIKKEGNLIQNRSF,;
CCDS5749.1, Ins, A_7,
(SEQIDNO: 725)
SSRKDGCYWCRSNRCRIGFSLAKTWCRCDSS,;
CCDS14032.1, Ins, A_7,
(SEQIDNO: 726)
TEAKEGEKEAWGPAEEAKNQTSSSHCGTPRT,;
CCDS8328.2, Del, A_7,
(SEQIDNO: 727)
TTTKKKQLRCWNTWAKMFFMVFLIIWQNTMF,;
CCDS44174.1, Del, A_7,
(SEQIDNO: 728)
TVFHHIVNQSINFRKNAEKNDKKQQGMAGLV,;
CCDS31627.1, Del, A_7,
(SEQIDNO: 729)
VNFKKSMNCWRKPGDKVYLLPNGTGQRLWSG,;
CCDS5461.1, Del, A_7,
(SEQIDNO: 730)
YVWIMKRKAFQLQQFEKLKFSGSLPIRVLSI,;
CCDS3424.1, Del, A_7,
(SEQIDNO: 731)
CWLFYRRFLFYPQSQYPWFLFLLKDYSTSL,;
CCDS659.1, Del, A_7,
(SEQIDNO: 732)
DEQDHGHPKDATGHHLDHPILVPVQVQKRN,;
CCDS13029.2, Ins, A_7,
(SEQIDNO: 733)
EAHCHHAEQALAHGEEADRAQGGPGICGEV,;
CCDS1836.1, Del, A_7,
(SEQIDNO: 734)
EGSYQILRVTLVALMWNLSQTLRRKEAVMK,;
CCDS1296.2, Del, A_7,
(SEQIDNO: 735)
EKTPNQALKNQKRKWMLYHSLISTIMQVLL,;
CCDS9464.1, Ins, A_7,
(SEQIDNO: 736)
GLHKSAAFHCPDFPVLPFISAWQFPHSTFP,;
CCDS4092.1, Del, A_7,
(SEQIDNO: 738)
ILVDLMPERVQNMRGVMLFLSETEFTNSTD,;
CCDS32708.1, Ins, A_7,
(SEQIDNO: 739)
IPLSQNSLPHDPQNTQGQKESKGQKEKLSE,;
CCDS11504.2, Ins, A_7,
(SEQIDNO: 740)
IPLSQNSLPRDPQNNQSQKESKGQKEKLSE,;
CCDS42353.1, Ins, A_7,
(SEQIDNO: 741)
IPLSQNSLPRDPQNTQSQKESKGQKEKLSE,;
CCDS1765.1, Del, A_7,
(SEQIDNO: 742)
IRTAPDGMEMKWPKEQKERATEMGRNPALP,;
CCDS4657.1, Ins, A_7,
(SEQIDNO: 743)
KHFLCGVCGSTFCICFLCRIRVSPTGSNGI,;
CCDS6301.1, Ins, A_7,
(SEQIDNO: 744)
KIKAAAGRSQKTAESLSYKDSFLASSPEND,;
CCDS10916.1, Ins, A_7,
(SEQIDNO: 745)
KKGPEHSSQEEKTRWPLIRRRGRGGCQFRI,;
CCDS10620.1, Ins, A_7,
(SEQIDNO: 746)
KLLLWLVLLFRSLLFFIHRRNCRSGCRAHLY,;
CCDS11260.1, Del, A_7,
(SEQIDNO: 747)
KLSTKYFLPSVIVNKNWRLMSAIKKPKGNS,;
CCDS13115.2, Del, A_7,
(SEQIDNO: 748)
LEWWSWDFQPLPSQKLGLGFVFQRHIPGRC,;
CCDS32918.1, Del, A_7,
(SEQIDNO: 749)
LTLERTHMNVRNVGKHLLLSVPCIDIKRLT,;
CCDS45989.1, Del, A_7,
(SEQIDNO: 750)
LTLERTRMDVRNVGKHLLLSVPCIDIKRLT,;
CCDS6223.1, Del, A_7,
(SEQIDNO: 751)
MDPFARRLQLKNGRLLIQADRELKELIFQQ,;
CCDS46348.1, Ins, A_7,
(SEQIDNO: 752)
METNNIWHLFLPCNYSGEKEVWPPWLEYLL,;
CCDS8336.2, Del, A_7,
(SEQIDNO: 753)
MSHLIAHQALKMSGLRLFHPRLLTRKKPGK,;
CCDS13288.1, Del, A_7,
(SEQIDNO: 754)
NGTTVLQSKIQLASEKHPKAESSFLKMTQC,;
CCDS47256.1, Ins, A_7,
(SEQIDNO: 755)
NLYCLQRPILWMDKGRWCLQPFITQQQTDF,;
CCDS31532.1, Ins, A_7,
(SEQIDNO: 756)
NNYLCWLFSTVFLLHCSCPCGNFYSCCDGL,;
CCDS58082.1, Ins, A_7,
(SEQIDNO: 757)
NRRVSGIFSEAPGIQSRPREGQRNRPRFQQ,;
CCDS7780.1, Ins, A_7,
(SEQIDNO: 758)
NTGRSPGNDCWGHRHHTHVAAHSPHHQGPQ,;
CCDS34547.1, Del, A_7,
(SEQIDNO: 759)
PLMKSLRIRNLHYINLQKKQRLWRKMFILM,;
CCDS31756.1, Del, A_7,
(SEQIDNO: 760)
QATSRRRLQTCFSNLVLRIQELRKEKSMMP,;
CCDS43493.2, Del, A_7,
(SEQIDNO: 761)
QTLRKKINPRTTVVKKQIPKEPNQNSSATP,;
CCDS34482.1, Del, A_7,
(SEQIDNO: 762)
RVYLLRITKKVEMITKTMKILEIQIAMMLY,;
CCDS34743.1, Ins, A_7,
(SEQIDNO: 763)
SGAEQSASVLLWTRCTVRPDTTGYPTKICG,;
CCDS3397.1, Del, A_7,
(SEQIDNO: 764)
SPRSSVWERKSRPQTSRPPQLRKMFPPAAI,;
CCDS9247.1, Ins, A_7,
(SEQIDNO: 765)
SSRKNATESQTYGFLPCPKELQEEQSRAAV,;
CCDS33391.1, Ins, A_7,
(SEQIDNO: 767)
TYCEPRGAAETGGVCDAGPRQLTGHVRNPV,;
CCDS42016.1, Del, A_7,
(SEQIDNO: 768)
WVHSLPVKKKRRLISAKSRFKEQKQNSTHW,;
CCDS34137.1, Del, A_7,
(SEQIDNO: 769)
ALLCLIALLSRKQTWKIRTCLRRVRQKCF,;
CCDS43349.1, Ins, A_7,
(SEQIDNO: 770)
AVLCWKRQKTKSFGNCFRRGKKESLKRMP,;
CCDS3252.1, Ins, A_7,
(SEQIDNO: 771)
CFCDDDDLQGVIPQPPNSLPRRQCGSGCG,;
CCDS42478.1, Del, A_7,
(SEQIDNO: 772)
CRIRERSLGGRLRPPTMARVTPSQLASMP,;
CCDS7584.1, Del, A_7,
(SEQIDNO: 773)
DVESQIHCRKERVRRDQITLLIQNLKQSI,;
CCDS3205.1, Del, A_7,
(SEQIDNO: 774)
EATSNQDLLQMVPCSMQDPLLSLWTLFTE,;
CCDS45003.1, Ins, A_7,
(SEQIDNO: 775)
EDRTTKGYYSQNSQSKEEICDKSMWPCNF,;
CCDS9504.1, Ins, A_7,
(SEQIDNO: 776)
EIQFKHPSDLFLVWLHRFQGYRDAYVRFD,;
CCDS41816.1, Ins, A_7,
(SEQIDNO: 777)
EYCETGKRATNKQGKNNIKRRCKPTANNK,;
CCDS11928.1, Ins, A_7,
(SEQIDNO: 778)
FNCNFSIRKMSTRGCQESRVASVYRKGQS,;
CCDS14684.1, Del, A_7,
(SEQIDNO: 779)
GNGSGGIKKSSKKTISFLQALIFLGSHTR,;
CCDS31867.1, Del, A_7,
(SEQIDNO: 780)
HSRAQNPGSLLLKNSLEFLIDPLMPSRTL,;
CCDS47878.2, Ins, A_7,
(SEQIDNO: 781)
IHFCLSPFFYYKPHRTRSNLPRFMERFSC,;
CCDS4140.1, Ins, A_7,
(SEQIDNO: 782)
KFRGRFGGSEGSDCPVGSLLSCSQKTVSR,;
CCDS892.1, Del, A_7,
(SEQIDNO: 783)
KIWPNKFYQGLENLSPSSPWLTSESFLAS,;
CCDS3227.1, Ins, A_7,
(SEQIDNO: 784)
KKKEDSTPFSLFRFLWNKQNCRWIQWNFL,;
CCDS9363.1, Del, A_7,
(SEQIDNO: 786)
KNMKRLVRRRCPPLLKFYVRGFLQNSPCT,;
CCDS34872.1, Del, A_7,
(SEQIDNO: 787)
LLLENRPWKMSRHWDAPKRVNQKSLKILM,;
CCDS9391.1, Ins, A_7,
(SEQIDNO: 789)
LPSDITEDFECCPIPPCCQGQVSLYNVLQ,;
CCDS2702.1, Del, A_7,
(SEQIDNO: 790)
LSIKRKGKSRNTAEDTNKQRREGFLYRLT,;
CCDS31906.1, Ins, A_7,
(SEQIDNO: 791)
NQGFTLAVSVCPGAAYGVCLGTGVQKRQL,;
CCDS418.1, Del, A_7,
(SEQIDNO: 792)
PIAKMIEGTGSLRKLSGSSVNPRLPQQLQ,;
CCDS9014.2, Del, A_7,
(SEQIDNO: 793)
QEMVQKHLLSFFAICLEDFMQSQTEKRIL,;
CCDS13265.1, Ins, A_7,
(SEQIDNO: 794)
QSCSNGKQFTKGKCWTYEALCGLITLQHN,;
CCDS14426.2, Ins, A_7,
(SEQIDNO: 797)
SPSGVPSSMGRSPRDGYDLLLFSHCEYIH,;
CCDS54029.1, Del, A_7,
(SEQIDNO: 798)
SQMLSPQRERKRRPSQLPQMPPTETSRPR,;
CCDS32133.1, Ins, A_7,
(SEQIDNO: 799)
SRNSTEAIIIPTANRPSNGRNSADESRLL,;
CCDS41612.1, Del, A_7,
(SEQIDNO: 800)
SRSSVRRMEKSFAGFVNCLRNTKVTKHSA,;
CCDS10721.1, Ins, A_7,
(SEQIDNO: 801)
SSKNSKSVHGPLSTSAAFYRNSEQIYLFL,;
CCDS13443.1, Del, A_7,
(SEQIDNO: 802)
SSKSRGICPWIACSAARPSHIQKTLINMS,;
CCDS10622.1, Del, A_7,
(SEQIDNO: 803)
VILVPQETENLMITKPLMILNGQMKRQNL,;
CCDS9032.1, Del, A_7,
(SEQIDNO: 804)
VLKGFWRWIQAMCKENTIFVLFILKKKTY,;
CCDS53588.1, Del, A_7,
(SEQIDNO: 805)
YSANLRNQTQRTPQQTQSNGPREASRKQT,;
CCDS9052.1, Del, A_7,
(SEQIDNO: 806)
DERRRRAKGLLQQGNRNLIKNQEPQWMK,;
CCDS32178.1, Ins, A_7,
(SEQIDNO: 807)
DSEQNSELPQRVCGGRPAHLVHRQESSE,;
CCDS41507.1, Del, A_7,
(SEQIDNO: 808)
DTEIFFHMIQHAFLLEKARTTSMLVILE,;
CCDS41485.1, Del, A_7,
(SEQIDNO: 809)
DYQRLPSENRITWRRKSVFKICASICMR,;
CCDS53732.1, Ins, A_7,
(SEQIDNO: 810)
EECTNVRGGATTGGQSQRQLSAATGQSP,;
CCDS14435.1, Del, A_7,
(SEQIDNO: 811)
EFQIQKILTLLKMRNTAKKEWIIKGTKI,;
CCDS1628.1, Del, A_7,
(SEQIDNO: 812)
FLEKEVQEAKKGLLRRYHQDFFQEILHL,;
CCDS4382.1, Del, A_7,
(SEQIDNO: 813)
FLNAKPSLDKLEKRKANIKKNLLRKCRN,;
CCDS643.1, Del, A_7,
(SEQIDNO: 814)
GKSTSIINTELLLSTSSITSTPMKTMGF,;
CCDS34171.1, Del, A_7,
(SEQIDNO: 815)
GNITKRKKRREKRKSILLHLIVLNSPES,;
CCDS33304.1, Ins, A_7,
(SEQIDNO: 818)
ILGQEKTEVARNGNERSSASRRTEEINR,;
CCDS47878.2, Ins, A_7,
(SEQIDNO: 819)
KGRASLVPEYTSAGEERPVPGGGSSTVS,;
CCDS5089.1, Del, A_7,
(SEQIDNO: 820)
KRLFSCALASLQELDDCSLAGLQIMCLV,;
CCDS2635.1, Ins, A_7,
(SEQIDNO: 822)
KSPGGITCQRSNFYFILCSRICFEIPRL,;
CCDS31650.1, Del, A_7,
(SEQIDNO: 823)
LHLLIGRNTRNSATLNYQVKIPMKQRCF,;
CCDS9012.1, Del, A_7,
(SEQIDNO: 824)
LLRKNIRHSHHHNQKVRSIKNWLVVNTF,;
CCDS126.1, Del, A_7,
(SEQIDNO: 825)
LNSRWETKACPFQLESQTEASGTTGHRD,;
CCDS43328.1, Ins, A_7,
(SEQIDNO: 827)
LSAGRESTKGFKTCTSEGPIAKAKAKCR,;
CCDS34547.1, Del, A_7,
(SEQIDNO: 828)
LSRNCLLLLPQRRDRSMWILKLRKSLML,;
CCDS34698.1, Ins, A_7,
(SEQIDNO: 830)
NHHRRERSKGEGERIGKKLQSELQLHHP,;
CCDS6673.1, Ins, A_7,
(SEQIDNO: 832)
NKEKKESSPIEPRDHNEPSISEHVCWNV,;
CCDS3492.1, Ins, A_7,
(SEQIDNO: 833)
NKSSFECSSKDKERECSCQPCRPGQGKF,;
CCDS31783.1, Ins, A_7,
(SEQIDNO: 834)
NPCGGWEGAGSSRSLHQSHYFRRIREGF,;
CCDS12394.1, Ins, A_7,
(SEQIDNO: 835)
NPDLPHPGPKESAGDVHQAEVRADEEGL,;
CCDS47495.1, Del, A_7,
(SEQIDNO: 836)
NQLLPVLWELCCRTGSWWPRMKSQPSQD,;
CCDS8493.1, Ins, A_7,
(SEQIDNO: 837)
NRRRGFSGHKGKAVHQPPFPGCKGEDVH,;
CCDS5832.1, Ins, A_7,
(SEQIDNO: 838)
NRSPGSDPFPYPEECDCHPQVCDTSTHC,;
CCDS4255.1, Del, A_7,
(SEQIDNO: 839)
NSISKNFSPMKSILRQEMLEPFLENAPF,;
CCDS10589.1, Ins, A_7,
(SEQIDNO: 840)
NYSTLQISQKGRIYSRAAKDYQWEDKKK,;
CCDS45945.1, Del, A_7,
(SEQIDNO: 841)
PMNVIIAGNPSQVTPTFLCIRECIIGKC,;
CCDS3146.1, Del, A_7,
(SEQIDNO: 842)
PVQCASKKLFLLKAIQTLTQTVVKKKMK,;
CCDS34565.1, Del, A_7,
(SEQIDNO: 843)
QFQMWISISLTSALAVAMLSFQYLCPCL,;
CCDS55597.1, Del, A_7,
(SEQIDNO: 844)
QKTSLWQSLKLIKNRTVKWRRVEEKIWI,;
CCDS35457.1, Ins, A_7,
(SEQIDNO: 845)
RGGRKLGRLGKSNQANCREICMHHKDIS,;
CCDS41963.1, Del, A_7,
(SEQIDNO: 846)
RISPLLTILEIFYLKKRKQLLSFQQICQ,;
CCDS32554.1, Del, A_7,
(SEQIDNO: 848)
RRRQSGGKRGREMGGKSKWNRSHQQLCF,;
CCDS32704.1, Del, A_7,
(SEQIDNO: 849)
SLILFPPLIIQRLTIFIEILKKTFTMSMKR,;
CCDS5944.1, Del, A_7,
(SEQIDNO: 850)
SQKSATASCAHTTPTLKSSLQKSISAWP,;
CCDS33971.1, Ins, A_7,
(SEQIDNO: 853)
TPGRTRSTTSQHICGSRRQHFNWIRSLL,;
CCDS751.1, Ins, A_7,
(SEQIDNO: 854)
TRVLYEFLQPGSQRYAAQPHGPLCIQLP,;
CCDS47033.1, Ins, A_7,
(SEQIDNO: 855)
TWGEAGCCQRQNDAAGVSWDTADRCHED,;
CCDS32528.1, Del, A_7,
(SEQIDNO: 856)
VVNLGHSCCLDPETRLLRCGMSVLACAL,;
CCDS53775.1, Del, A_7,
(SEQIDNO: 857)
VWLVKRIIQTLTKRRKKKRVFRKEKTMN,;
CCDS32077.1, Del, A_7,
(SEQIDNO: 858)
WKRFVVVTNHFWPQMTCRPNTCNLRKNL,;
CCDS34480.1, Ins, A_7,
(SEQIDNO: 859)
WRGKLFKYTLQCNKNSRTYCKRNEDEDI,;
CCDS9441.1, Del, A_7,
(SEQIDNO: 860)
EITLCKADQEKVPPLQRQKKIHFLKDL,;
CCDS59367.1, Del, A_7,
(SEQIDNO: 861)
FILEENPTNVKNVAKLLTSSQLLLNIR,;
CCDS32980.1, Del, A_7,
(SEQIDNO: 862)
FILERNPISVKNVAKALFCPLILLHIR,;
CCDS43593.1, Del, A_7,
(SEQIDNO: 863)
FILERNPTNVRNVAKLLTNSQTLLDIR,;
CCDS5528.2, Del, A_7,
(SEQIDNO: 864)
FILKRNLTNVKIVAKSLVYFQSLLNIR,;
CCDS42292.1, Ins, A_7,
(SEQIDNO: 865)
FISLSVDYIGYTGKMSCWATKGHNEIR,;
CCDS59106.1, Ins, A_7,
(SEQIDNO: 866)
FWIVCSGEEGWIEKKAAARGRATKSKN,;
CCDS32493.1, Del, A_7,
(SEQIDNO: 867)
GIQASPLQEVTGPPRRCLTGLPPVVCK,;
CCDS4922.2, Del, A_7,
(SEQIDNO: 868)
GKNQLKHVQAFLWKNSLRTQLVHLAFL,;
CCDS3911.1, Del, A_7,
(SEQIDNO: 869)
GLSLSYGPVSPIIRRLWNIFVRNQEKI,;
CCDS30690.1, Del, A_7,
(SEQIDNO: 870)
KCLKVSGQKRERERSSWHLVLTLQRRP,;
CCDS11323.1, Ins, A_7,
(SEQIDNO: 871)
KEDDDFRNCFPRRRCYYTVDVICRSKD,;
CCDS43993.1, Del, A_7,
(SEQIDNO: 872)
KKRKKKRKPTGRYRQSNHPLRHPDARQ,;
CCDS14201.1, Ins, A_7,
(SEQIDNO: 873)
KLKFKFLYNTFFGNSHSLNKSKTPTSD,;
CCDS45779.1, Del, A_7,
(SEQIDNO: 874)
KNCCLMMGMTSWPPWGLETAPKQRRGR,;
CCDS7283.1, Ins, A_7,
(SEQIDNO: 875)
KPLTKGTCFGSNKGTGKPSSQRLQRYN,;
CCDS7597.1, Del, A_7,
(SEQIDNO: 876)
KRRKGRKSQQMMSLGVGTPGAEGGSPY,;
CCDS6343.1, Ins, A_7,
(SEQIDNO: 877)
KSKLQHISVGKFVCSNQPMYLSASQGP,;
CCDS43042.1, Del, A_7,
(SEQIDNO: 879)
KTQIANAQDRRELEKIPTMSRRVKSSS,;
CCDS41485.1, Ins, A_7,
(SEQIDNO: 880)
KTTRGCLQKTELLGGESLFSRFVLQFV,;
CCDS58744.1, Del, A_7,
(SEQIDNO: 881)
LILEEKVVIKGIPLDHWTMKVSNKNLL,;
CCDS46029.1, Del, A_7,
(SEQIDNO: 882)
LILERNHTNVKNVAKPSTGPHTLLHIR,;
CCDS32971.1, Del, A_7,
(SEQIDNO: 883)
LIVEKSHMNVQGVVKPLGGAVPSEDMK,;
CCDS10898.1, Del, A_7,
(SEQIDNO: 884)
LVLVVVQIQNGLGRGTNILKLIMKGRC,;
CCDS6266.2, Del, A_7,
(SEQIDNO: 886)
LWKIYTVTIFIHISLWPLNYGRLLKDII,;
CCDS13359.1, Ins, A_7,
(SEQIDNO: 887)
MFRSQTRCMRNAKRNWPLPGLFSSLVV,;
CCDS2221.2, Del, A_7,
(SEQIDNO: 888)
MQRSIPAFWKVLWTDPYSATIRTHHQD,;
CCDS2872.1, Ins, A_7,
(SEQIDNO: 889)
NAASTAAASGPRERGKLCKRHQTSSFW,;
CCDS12228.1, Ins, A_7,
(SEQIDNO: 891)
NGSRQNSHELQDPPSQVHSVRAVPGRP,;
CCDS30628.1, Ins, A_7,
(SEQIDNO: 892)
NHGRIWNRDYVGETETRLQTRAKQSDK,;
CCDS3211.1, Ins, A_7,
(SEQIDNO: 893)
NILIQAHCLFSQYLVTICTTSGNHCFT,;
CCDS42650.1, Ins, A_7,
(SEQIDNO: 894)
NMLSPIFCHLPFYHWLHYIWNYSSGYI,;
CCDS43729.1, Ins, A_7,
(SEQIDNO: 896)
NPTTKICAEYSARTDQCRGGGLLTLKY,;
CCDS46285.1, Ins, A_7,
(SEQIDNO: 897)
NRERKLSGKQNDLTRSLPTKFSGAVRA,;
CCDS56348.1, Ins, A_7,
(SEQIDNO: 898)
NRITEGPCKCTCCCTKRTTRTKEKGGL,;
CCDS34913.1, Ins, A_7,
(SEQIDNO: 899)
NVSSTRVFLGHGGRCENSRHQKSQPDP,;
CCDS53935.1, Del, A_7,
(SEQIDNO: 900)
PLRPSGESGLSDLGTSAGREALALRNN,;
CCDS43650.1, Ins, A_7,
(SEQIDNO: 901)
PRLCCRFISAPSRPRGFKTTRIFWEVW,;
CCDS34158.1, Ins, A_7,
(SEQIDNO: 902)
QARPKRGSGKNKEISKRNGNFRRPSSI,;
CCDS43378.1, Ins, A_7,
(SEQIDNO: 903)
QKHETRRKSKYNEDFERAWREDLTIKR,;
CCDS32064.1, Ins, A_7,
(SEQIDNO: 904)
QKHWIDHSIFCYLYSRGNISRVNKNAF,;
CCDS7639.1, Del, A_7,
(SEQIDNO: 905)
QSKALQPLMTFLKGNISMVHTTTILYL,;
CCDS46404.1, Del, A_7,
(SEQIDNO: 906)
RMMSESNLNIEEKKESFSSPDQLNWKI,;
CCDS6726.1, Ins, A_7,
(SEQIDNO: 907)
RNTSQIRLPLYPARTPASGIQRNDEQQ,;
CCDS1937.1, Del, A_7,
(SEQIDNO: 908)
RQTRRGREKKGPTRTVMRSPSSLLPRL,;
CCDS5039.1, Ins, A_7,
(SEQIDNO: 909)
SFQCRAAADLWNDGNSCEIMGTNLCHF,;
CCDS31136.1, Ins, A_7,
(SEQIDNO: 910)
SISPASGLCRSALGLCQVSPAVGTEGF,;
CCDS34509.1, Ins, A_7,
(SEQIDNO: 911)
SQYIAGGEIRTGCRGRNTVKSEQFSSE,;
CCDS35201.1, Del, A_7,
(SEQIDNO: 912)
SRGPKRQRWRRRPVVNLVLCLHETVNT,;
CCDS32135.1, Ins, A_7,
(SEQIDNO: 913)
SRNSTEAIIIPTANRPSNGRNSADESS,;
CCDS30715.1, Del, A_7,
(SEQIDNO: 914)
SSANVIALICLSRLTQINLLEQTAGQI,;
CCDS9458.1, Del, A_7,
(SEQIDNO: 915)
TLMGLLKWILKQIKILRGARALIISSK,;
CCDS53935.1, Ins, A_7,
(SEQIDNO: 916)
VLYPAGQGASRDGALCTRFISTCSYQL,;
CCDS55679.1, Ins, A_7,
(SEQIDNO: 917)
VSTVVGLTSLCTTCDEWTQRAGWSAGQ,;
CCDS34162.1, Ins, A_7,
(SEQIDNO: 918)
WMAYTWKKWYRKHKSSRWIPWWKFPFS,;
CCDS43501.1, Del, A_7,
(SEQIDNO: 919)
YRSAGIKNLAMEFWLHEWHQQQQVALH,;
CCDS42697.1, Del, A_7,
(SEQIDNO: 920)
ARCFLIIELGGLIKLKLNRLNLINIF,;
CCDS55872.1, Del, A_7,
(SEQIDNO: 921)
ATNSKTIPLLAQDQPGVDLGMGTSGL,;
CCDS8552.1, Del, A_7,
(SEQIDNO: 922)
CMTCWGRTCCGGSKPMCSRTCPPRQN,;
CCDS8963.1, Del, A_7,
(SEQIDNO: 923)
DILMKMLLRTLKNMKVWSINLLKNPL,;
CCDS41816.1, Del, A_7,
(SEQIDNO: 924)
DVQKNWSSKKENMKIQITKLNWETLI,;
CCDS4066.1, Del, A_7,
(SEQIDNO: 925)
EENCLRNRNKKLKMLLNYLIQTKMKQ,;
CCDS31071.1, Del, A_7,
(SEQIDNO: 926)
EFLFVRSKAFFPRYLASSLVQTLFNG,;
CCDS53334.1, Del, A_7,
(SEQIDNO: 927)
ETQKKHVPSVLLKKVMKNLKMMMMMI,;
CCDS32178.1, Del, A_7,
(SEQIDNO: 928)
FGAKLRITSTCMRRKACAPCASPREF,;
CCDS13315.1, Del, A_7,
(SEQIDNO: 929)
FIHSRRMSLASLWVRPYQSCRLEKWR,;
CCDS44157.1, Del, A_7,
(SEQIDNO: 930)
GGAPLPSWSPPCQSLRQAVTSSRTSG,;
CCDS7585.1, Del, A_7,
(SEQIDNO: 931)
GIYFMLQTPTITRLKLWIQKQKTVQH,;
CCDS718.1, Del, A_7,
(SEQIDNO: 932)
GMTFVNRIRKHHQIVAQLYFRSFSVL,;
CCDS58914.1, Ins, A_7,
(SEQIDNO: 933)
HRNVQCHDAVEENGQSSFITSPILHS,;
CCDS6192.1, Ins, A_7,
(SEQIDNO: 934)
IAGNGFFYSGFNGQAPSGSKYRAVTI,;
CCDS34472.1, Del, A_7,
(SEQIDNO: 935)
IHATLQSHLCTFQHLPVLLKQIQLLS,;
CCDS2702.1, Ins, A_7,
(SEQIDNO: 937)
KEETNSFRRLGFLFQFLLFFRHFRK,;
CCDS2291.1, Ins, A_7,
(SEQIDNO: 938)
KKKVMSASSYGENQRIRNSLQNGSRE,;
CCDS44826.1, Del, A_7,
(SEQIDNO: 939)
KRSCKMNRKTKGKGKMRNRNSIPRKD,;
CCDS53502.1, Del, A_7,
(SEQIDNO: 940)
KTLQTSFQPVCLKHHSFLKDSYALCL,;
CCDS59035.1, Del, A_7,
(SEQIDNO: 941)
KYTKIRLKNKRNLKGKYKLKKLDTAL,;
CCDS44172.1, Del, A_7,
(SEQIDNO: 943)
LLKIWKHQNLQRAMKLQKLHLWVTGI,;
CCDS41939.1, Del, A_7,
(SEQIDNO: 944)
LQQKYYSRLRNHWHWQVGLCQTGVNN,;
CCDS3028.1, Ins, A_7,
(SEQIDNO: 945)
NEEERTGCPRGCPASAPTAPPVHHSP,;
CCDS32946.1, Ins, A_7,
(SEQIDNO: 946)
NETSWYQRPVHRCSGEVRDSAGIFFL,;
CCDS1779.1, Ins, A_7,
(SEQIDNO: 947)
NKTQRQPSNFRSVHTLEQGLWRYHCL,;
CCDS34290.1, Ins, A_7,
(SEQIDNO: 948)
NPQADTQICGGWCGGEHHHLQDHQRR,;
CCDS9411.1, Ins, A_7,
(SEQIDNO: 949)
NSLPQLWEWSTYCPCNNRRRSLYLGS,;
CCDS4950.1, Del, A_7,
(SEQIDNO: 950)
PTGSRSGQIPMPNTSTARRTRMRSGT,;
CCDS3974.1, Del, A_7,
(SEQIDNO: 951)
QFTITQSLANAQFSQQQMLLSNLLVK,;
CCDS9946.1, Del, A_7,
(SEQIDNO: 952)
QKTLKTSVLISPMIFSLSQIQFIGKQ,;
CCDS8585.1, Ins, A_7,
(SEQIDNO: 953)
RGECYADPPAVVGHPGCIPRHPGDER,;
CCDS4289.1, Ins, A_7,
(SEQIDNO: 955)
SGLQHLQEVSSGGHPLPHHIPTSLWF,;
CCDS31441.1, Del, A_7,
(SEQIDNO: 956)
TKMKVIMPYVTWKVVGKSSRRKKQRA,;
CCDS47633.1, Del, A_7,
(SEQIDNO: 957)
TQRFWRINQDLEFQTVIPIPVCSMFR,;
CCDS10352.2, Del, A_7,
(SEQIDNO: 958)
WIRKTKLESASFRYFFVWRCVCNALQ,;
CCDS33524.1, Del, A_7,
(SEQIDNO: 959)
YQDQLLVQNLDIMISSQFQLEPPTSK,;
CCDS10239.1, Ins, A_7,
(SEQIDNO: 960)
YRSYAPRHCSSSEKQQECIYLWDDWN,;
CCDS1916.1, Ins, A_7,
(SEQIDNO: 961)
AVAASGGSDSTEEAREQPPGGDPTL,;
CCDS13443.1, Ins, A_7,
(SEQIDNO: 962)
CHPNRGVYALGLHVLQPDLHTFRRP,;
CCDS14010.1, Del, A_7,
(SEQIDNO: 963)
CLTRLYQSVLSMTTRIFLNKLLKID,;
CCDS44937.1, Del, A_7,
(SEQIDNO: 964)
CSVRSIGRGFYLSLKFYYCFITQTY,;
CCDS8788.1, Ins, A_7,
(SEQIDNO: 965)
DPCQPSPGPAEGTPRYSPAVDTGRV,;
CCDS43513.2, Del, A_7,
(SEQIDNO: 966)
ECPSFPSISMSVLYIDTMFNGTGVF,;
CCDS55323.1, Ins, A_7,
(SEQIDNO: 967)
EDNTRELWEYPQKRTMCCFQQSICI,;
CCDS43313.1, Del, A_7,
(SEQIDNO: 968)
EGRSSTNARSATVCLTAGTSSKITW,;
CCDS59135.1, Ins, A_7,
(SEQIDNO: 969)
ESPECCTKCFANQLKQFYKQRISSC,;
CCDS58232.1, Del, A_7,
(SEQIDNO: 970)
FLLGPRPPMSWLERWIFWTVPLLPL,;
CCDS34146.2, Ins, A_7,
(SEQIDNO: 971)
FNVKLHSSLYHSFFLHSSIYKMSFS,;
CCDS53961.1, Del, A_7,
(SEQIDNO: 972)
FSSSMMKVFEGTWNRLNKEKKKLLS,;
CCDS255.1, Ins, A_7,
(SEQIDNO: 973)
GGHEQSKFGGYKALDNKKSNGNPWV,;
CCDS13288.1, Ins, A_7,
(SEQIDNO: 974)
GMERQYFSPKSNSPPRSIQKQSPAF,;
CCDS43313.1, Del, A_7,
(SEQIDNO: 975)
GRLQKLQMLSLSHCHLQNQNLLKLR,;
CCDS3091.1, Ins, A_7,
(SEQIDNO: 976)
HFSIPKNVDSAVWICFGSWMCSSYH,;
CCDS30726.1, Ins, A_7,
(SEQIDNO: 977)
HHVGRTAWVFALVVVCILGPLLCSS,;
CCDS54796.1, Del, A_7,
(SEQIDNO: 978)
HRMSRNGSRKGWLILLITLASAGQN,;
CCDS13896.1, Del, A_7,
(SEQIDNO: 979)
HSQPLKTWAQHTPATLSSAQPRRDI,;
CCDS5230.1, Ins, A_7,
(SEQIDNO: 980)
IKVQAGREKRRLHSWVWCRTFHSRH,;
CCDS34101.1, Ins, A_7,
(SEQIDNO: 981)
KGGAISCLSCRGFCSFWCTNWRSSF,;
CCDS3757.1, Ins, A_7,
(SEQIDNO: 982)
KKECRNYVAGCNDLPQTEWYSFHLL,;
CCDS55311.1, Ins, A_7,
(SEQIDNO: 983)
KKRTCKSRTQPKSGFRGKARKAPKK,;
CCDS3751.1, Del, A_7,
(SEQIDNO: 984)
KMMVKCLKKKRKVNLRKRVKKKLKS,;
CCDS8676.1, Del, A_7,
(SEQIDNO: 986)
LCGAVRINRFFLLMTKLFDFGIMLL,;
CCDS8019.1, Ins, A_7,
(SEQIDNO: 987)
LGNRGCCCLGLQRECSLRNLHRRYR,;
CCDS3756.1, Del, A_7,
(SEQIDNO: 988)
LKILFNLCILMLLYIRKVMFTPVAK,;
CCDS32710.1, Del, A_7,
(SEQIDNO: 989)
LMTCRVNLIKEKKILKRKFINLRKL,;
CCDS42411.1, Del, A_7,
(SEQIDNO: 990)
LTTERKVEKRWIGNMTKKSLKKRGI,;
CCDS7148.1, Del, A_7,
(SEQIDNO: 991)
LWNLHLAKGQFIKMQTAWKKKRRHL,;
CCDS54777.1, Del, A_7,
(SEQIDNO: 993)
MNFLHHPDLYLESDEVAWLKMLCVN,;
CCDS3761.1, Del, A_7,
(SEQIDNO: 994)
MRSRTYYPLAITDTVEQSKRRMKSY,;
CCDS9793.1, Del, A_7,
(SEQIDNO: 995)
MTTVAGEKSWKNARVWSTSHFEAKE,;
CCDS3194.1, Ins, A_7,
(SEQIDNO: 996)
NFLLSGTVNSEIWNASEYTSYQRDS,;
CCDS10841.1, Ins, A_7,
(SEQIDNO: 998)
NKENQKEQTALYRGGQRCRCVCLRF,;
CCDS9344.1, Ins, A_7,
(SEQIDNO: 999)
NRTCPFRLFVRRMLQFTGNKVLDRP,;
CCDS41302.1, Ins, A_7,
(SEQIDNO: 1000)
NSPEGANCLSEERICSTFLLHTMHH,;
CCDS5830.1, Ins, A_7,
(SEQIDNO: 1001)
NTSGKRFYTQTARGSPASSNGKDTP,;
CCDS32787.1, Del, A_7,
(SEQIDNO: 1002)
PGAAPSASALAFLMSAAASLGLLVR,;
CCDS3200.1, Del, A_7,
(SEQIDNO: 1003)
PNLQWIFIKRFPYLIRTTLYFHPLE,;
CCDS9148.2, Del, A_7,
(SEQIDNO: 1004)
QHQEGFILRRLSQTYLHWKTVAALQ,;
CCDS46549.1, Ins, A_7,
(SEQIDNO: 1005)
QKEEEEKGKTTQESQKTKERNKGEK,;
CCDS54212.1, Ins, A_7,
(SEQIDNO: 1006)
QPSIFPGIFIFSNLTFATLFHTIWE,;
CCDS30956.1, Del, A_7,
(SEQIDNO: 1007)
QSADQCKEYLPMYCSILLEFPLQLE,;
CCDS55053.1, Del, A_7,
(SEQIDNO: 1008)
RKRKKNMWNQQSHQRKNTQFQVTNK,;
CCDS10594.1, Del, A_7,
(SEQIDNO: 1009)
RSFPPETKRIPLGSSWPSRRQSSHP,;
CCDS14406.1, Del, A_7,
(SEQIDNO: 1010)
RSTSTKHLLFSSRTHGNPGDRPHRC,;
CCDS42024.1, Del, A_7,
(SEQIDNO: 1011)
SEKMRLSLVIRHKIGRFLITILKRI,;
CCDS31444.1, Del, A_7,
(SEQIDNO: 1012)
SKAKILSSSEMGLGKLILCFPTLMM,;
CCDS2382.1, Del, A_7,
(SEQIDNO: 1013)
SQVERSLILWLSMALFVPRTLHIKR,;
CCDS4916.1, Del, A_7,
(SEQIDNO: 1014)
SRSSISIFKFMMKILSMGPSCQSVF,;
CCDS11260.1, Del, A_7,
(SEQIDNO: 1015)
SWKILVSKWFQKMAIYSYTLIKEVF,;
CCDS34723.1, Del, A_7,
(SEQIDNO: 1016)
TKIFQKKKIHKIRILLWIVKERPTK,;
CCDS55733.1, Ins, A_7,
(SEQIDNO: 1017)
TPENSLQQVAREHGSTPHRKDSLTR,;
CCDS1507.1, Ins, A_7,
(SEQIDNO: 1018)
TQGSKELRAHQASAPEVCTDLCSRP,;
CCDS33125.1, Ins, A_7,
(SEQIDNO: 1019)
WGHWRADLEAKGCERESRKRSPINQ,;
CCDS3877.1, Del, A_7,
(SEQIDNO: 1020)
WKMRRLQFSHVHLNHPNQKQSISWM,;
CCDS6266.2, Del, A_7,
(SEQIDNO: 1021)
WMTKHIVISRNWKIMLKTHRALFFT,;
CCDS41534.1, Del, A_7,
(SEQIDNO: 1022)
YIMNKSKLFKNSATSLANQNLKLKT,;
CCDS1377.1, Del, A_7,
(SEQIDNO: 1023)
ANSKLSSSLLLRKHSCGQKHLTSC,;
CCDS11512.1, Del, A_7,
(SEQIDNO: 1024)
ATNIIAKLWRMMTLNLKDQKILGK,;
CCDS5622.1, Del, A_7,
(SEQIDNO: 1025)
CMSSSPKWKIFSASWKRKDNKFIS,;
CCDS12495.1, Del, A_7,
(SEQIDNO: 1026)
EEQPILKKNIHAMNVGNLSAGNQY,;
CCDS13298.1, Del, A_7,
(SEQIDNO: 1027)
GCCRLLTEMGKRKRKRRSHWMKAQ,;
CCDS34740.1, Del, A_7,
(SEQIDNO: 1028)
GERNIQHVIAQNNLLSILMKILHK,;
CCDS9148.2, Ins, A_7,
(SEQIDNO: 1029)
GWQKCNWPGPGMYFKKSSTKKALS,;
CCDS44379.1, Ins, A_7,
(SEQIDNO: 1030)
GYLIFQQKSQALIRNKDSKRLIFR,;
CCDS53528.1, Ins, A_7,
(SEQIDNO: 1031)
GYLILQQKSQALIRNKDSKRLIFR,;
CCDS35057.1, Del, A_7,
(SEQIDNO: 1033)
HLWISLIFFMNSVNLSSPKASLLR,;
CCDS1842.1, Ins, A_7,
(SEQIDNO: 1034)
IAIKRNICQSPGGHVDLPQPLLCF,;
CCDS34146.2, Del, A_7,
(SEQIDNO: 1035)
IARRYLESFSVFSCFSGRLSVLFL,;
CCDS2021.1, Del, A_7,
(SEQIDNO: 1036)
ILKLTLKMILTLMYILEKQRLLLF,;
CCDS45021.1, Del, A_7,
(SEQIDNO: 1037)
KAAQFLHSRRKFRKKCHVLICRWT,;
CCDS46063.1, Ins, A_7,
(SEQIDNO: 1038)
KGEPFQGTSKTEQNLKGTSKTNQG,;
CCDS33810.1, Ins, A_7,
(SEQIDNO: 1039)
KHDCFNSYHSSLFGFVLKPKWRSD,;
CCDS43623.1, Ins, A_7,
(SEQIDNO: 1040)
KKGTNQQASREERKGKIKSYQCRI,;
CCDS56537.1, Del, A_7,
(SEQIDNO: 1041)
KKVKLLHENMDSSSWKRLLRLLPM,;
CCDS31658.1, Del, A_7,
(SEQIDNO: 1042)
KKVKSLYMMILKLSKVSHKEVEQK,;
CCDS10539.1, Ins, A_7,
(SEQIDNO: 1043)
KLPFPPRSGGQQEEQVSLARPHLR,;
CCDS41963.1, Del, A_7,
(SEQIDNO: 1044)
KSCVPGWCRWKTKFYRQRTLVLKK,;
CCDS5230.1, Del, A_7,
(SEQIDNO: 1045)
KTLPLIQGKMLCPQGPTVRQNRHQ,;
CCDS3158.2, Del, A_7,
(SEQIDNO: 1046)
LFLQKRSQSSSGSFCSSSPCQIRS,;
CCDS33545.1, Del, A_7,
(SEQIDNO: 1047)
LKLPRLLPHTPPPAPSSSLSPLVS,;
CCDS2259.1, Del, A_7,
(SEQIDNO: 1048)
LLDKFWCLFYCTAPSIAPTCGQAF,;
CCDS41815.1, Del, A_7,
(SEQIDNO: 1049)
LLGFQGPLGCLLQEAAARSREPLI,;
CCDS45820.1, Del, A_7,
(SEQIDNO: 1050)
LLLGNQIHSILLGKITYYVCAMIS,;
CCDS44402.1, Ins, A_7,
(SEQIDNO: 1051)
LSTHKCFRTSNYVPFRSNKYGNHI,;
CCDS9767.1, Ins, A_7,
(SEQIDNO: 1052)
LTGKETQKLYGRPCREKRNGIGFK,;
CCDS42805.1, Ins, A_7,
(SEQIDNO: 1053)
NEREGEEKGKGQIESQGEKAQRGE,;
CCDS10622.1, Ins, A_7,
(SEQIDNO: 1054)
NQTQQRNWEENWKYRKYIKHKRTL,;
CCDS30956.1, Ins, A_7,
(SEQIDNO: 1055)
NSQQTSARNTYLCTAQYFWNFHSS,;
CCDS3123.1, Ins, A_7,
(SEQIDNO: 1056)
NTTGMCSRRNYISPSTLVFNERVY,;
CCDS54834.1, Ins, A_7,
(SEQIDNO: 1057)
PSSKAKSRGKELSHILCTAGRAGT,;
CCDS44337.1, Del, A_7,
(SEQIDNO: 1058)
QDILQAKETEWHKVRAREEKLRKF,;
CCDS33391.1, Del, A_7,
(SEQIDNO: 1059)
QKHFSILNLPQKQISHIVSQRRDI,;
CCDS10606.1, Del, A_7,
(SEQIDNO: 1060)
QNRASCLDAWANQKGELMYRLILK,;
CCDS34238.1, Del, A_7,
(SEQIDNO: 1061)
QPSPASGYLQSMSGTGTSMWPSQH,;
CCDS93.1, Del, A_7,
(SEQIDNO: 1062)
RDHMMWWFYQEVIWAHRIYLSLLL,;
CCDS55959.1, Ins, A_7,
(SEQIDNO: 1063)
RGPETTIFLLLPISIISAANFMSF,;
CCDS32234.1, Del, A_7,
(SEQIDNO: 1064)
RHFLEVEGKLNKEIIHRMKMGFKN,;
CCDS5954.1, Ins, A_7,
(SEQIDNO: 1066)
RKKDHFRNDTNTQKAWLLHLGRSL,;
CCDS10008.1, Ins, A_7,
(SEQIDNO: 1067)
RLQVGRILASYEEFFLNGRRRYHV,;
CCDS41477.2, Del, A_7,
(SEQIDNO: 1068)
RNGMRRKKVHPRLKDHFRKNLPKK,;
CCDS5930.1, Del, A_7,;
(SEQIDNO: 1069)
SIPVSLEAQVECSSHSSKQTKLTM,;
CCDS45727.1, Ins, A_7,
(SEQIDNO: 1070)
SISAGTHVPGPPGQEKPVHRRQRG,;
CCDS4662.1, Del, A_7,
(SEQIDNO: 1071)
SKNMSGLRPRFLCRTRFFCWAPRS,;
CCDS55466.1, Del, A_7,
(SEQIDNO: 1072)
SLMSKKWKKAALLSTLNLQTWKMK,;
CCDS33566.1, Del, A_7,
(SEQIDNO: 1073)
SRYEWNLESLNGQNGKLAKPPQPS,;
CCDS54820.1, Ins, A_7,
(SEQIDNO: 1074)
STALSQSLCSTFGPGTRHQSSVPT,;
CCDS46543.1, Ins, A_7,
(SEQIDNO: 1075)
STERAYSRRAGDGLPACGRRGGVL,;
CCDS3467.1, Del, A_7,
(SEQIDNO: 1076)
STFQIIFQSANANGNLNCCRSMGY,;
CCDS54426.1, Del, A_7,
(SEQIDNO: 1077)
STIYLRKKMKTLKPAGKILLFCKN,;
CCDS30628.1, Del, A_7,
(SEQIDNO: 1078)
SWEDLEQRLRWRNRNPSPNQGQTK,;
CCDS54808.1, Del, A_7,
(SEQIDNO: 1079)
TKISNGRPINRSSSILDRLQPHGG,;
CCDS5734.1, Ins, A_7,
(SEQIDNO: 1080)
TRKDKQSSPWAKTISTRQIISNII,;
CCDS31136.1, Del, A_7,
(SEQIDNO: 1081)
DQPCIWPVQVSTWPVPSFSCSRD,;
CCDS8253.1, Del, A_7,
(SEQIDNO: 1083)
EGKEKMRWKKSQQLCKKLTKRKF,;
CCDS9244.1, Del, A_7,
(SEQIDNO: 1084)
EQRKPWKKRSYLKNCGSQVKRST,;
CCDS31816.1, Del, A_7,
(SEQIDNO: 1085)
HFLHVLPTWWSCPFLMAAASSCM,;
CCDS34530.1, Del, A_7,
(SEQIDNO: 1086)
HFSSFLVDPLTFRRKTMALAFLL,;
CCDS10624.2, Ins, A_7,
(SEQIDNO: 1088)
KEKGKGNDERWKQTRRSVDKSIC,;
CCDS32097.1, Ins, A_7,
(SEQIDNO: 1089)
KFRVQIIYSKRTCVKTLWAEFYL,;
CCDS47331.1, Del, A_7,
(SEQIDNO: 1090)
KLEKVVVQLTLLNMKIKNGEMKV,;
CCDS9407.1, Del, A_7,
(SEQIDNO: 1091)
KVGSGFLGKNYLPWTSFSGDCVV,;
CCDS41485.1, Del, A_7,
(SEQIDNO: 1092)
LLQESVIQTPKKTRISSVLTIMR,;
CCDS1802.1, Del, A_7,
(SEQIDNO: 1093)
LQETMDQVIILHFRVHLPQLSGI,;
CCDS8664.1, Del, A_7,
(SEQIDNO: 1094)
LRLHLPRYLDFFMTKKMKAIWIP,;
CCDS10245.2, Del, A_7,
(SEQIDNO: 1095)
LTVALRQPLPVVATHLGIASTKN,;
CCDS12228.1, Ins, A_7,
(SEQIDNO: 1096)
NAPGEEEETEQESHLLGRRSRQD,;
CCDS11963.1, Ins, A_7,
(SEQIDNO: 1097)
NFYILRGKTEASYRYCFTWSNRS,;
CCDS3993.1, Ins, A_7,
(SEQIDNO: 1098)
NLASHTKAPATSASSCCTRFFEN,;
CCDS1389.1, Ins, A_7,
(SEQIDNO: 1099)
NSCTKERRVYADAGILYQTASIC,;
CCDS42690.1, Ins, A_7,
(SEQIDNO: 1100)
NTTEVQSLSCENLHFQSKQVPED,;
CCDS4529.1, Ins, A_7,
(SEQIDNO: 1101)
NVEGCIQSTSIFRSLEQPSWKSA,;
CCDS54212.1, Ins, A_7,
(SEQIDNO: 1102)
PKGKDDDFHKGHKCKLISINRFY,;
CCDS8976.1, Del, A_7,
(SEQIDNO: 1103)
PVKILNKTRMLQKNGLPLLSKVN,;
CCDS10180.1, Del, A_7,
(SEQIDNO: 1105)
QLCQKRLYPPEIVTLLISGYLPS,;
CCDS35229.1, Del, A_7,
(SEQIDNO: 1106)
QLLTHREMGKSRGPKCQSSQNDF,;
CCDS9056.1, Del, A_7,
(SEQIDNO: 1107)
QRKSSKMMHWPLKSSFEKMTRDL,;
CCDS14435.1, Del, A_7,
(SEQIDNO: 1108)
QRNLQVQDAFLPTVWALVRLYRW,;
CCDS1113.2, Del, A_7,
(SEQIDNO: 1109)
QRRKRTFANGIEKETSKLGKMMV,;
CCDS47430.1, Del, A_7,
(SEQIDNO: 1110)
QSQCWRRRCWTMMGVAWPPSLNP,;
CCDS2614.1, Del, A_7,
(SEQIDNO: 1111)
QSTCCPVASGSSWSTTSRSWKCC,;
CCDS1605.1, Ins, A_7,
(SEQIDNO: 1112)
QTQRRIPHSPSQIPVPLPEIWCT,;
CCDS44945.1, Del, A_7,
(SEQIDNO: 1113)
RNVCYTGRKREGYMEKLRFWLSV,;
CCDS47865.1, Ins, A_7,
(SEQIDNO: 1114)
RPEGTERTQGEKRAQGTQDPESP,;
CCDS54424.1, Del, A_7,
(SEQIDNO: 1115)
RPLKLFLEKSHQLKYRRCLRKLW,;
CCDS8585.1, Del, A_7,
(SEQIDNO: 1116)
RRMLRGSSSGCGAPRMYPKTSRR,;
CCDS55025.1, Ins, A_7,
(SEQIDNO: 1117)
RSPRDAWFNGKQWLTRPAWNTGI,;
CCDS3401.1, Del, A_7,
(SEQIDNO: 1118)
SGRTVWIMVSPCSTRSEFLARAF,;
CCDS1359.1, Del, A_7,
(SEQIDNO: 1119)
SLSPPHPVLLSIPWTQIPQGCLP,;
CCDS34206.1, Ins, A_7,
(SEQIDNO: 1120)
SNMVCSFLLFNRTWITFMCFSIH,;
CCDS44663.1, Del, A_7,
(SEQIDNO: 1121)
STLCSRKSQIPSSPKWLSTGPRP,;
CCDS679.1, Del, A_7,
(SEQIDNO: 1122)
STRNTEVLFQTYLMEQSLVQCSV,;
CCDS46935.1, Ins, A_7,
(SEQIDNO: 1123)
SVGENSERNSPSPGAGRFGIGYL,;
CCDS54288.1, Del, A_7,
(SEQIDNO: 1124)
SVQKRVAAVRKSCRDGTVDPVGT,;
CCDS32097.1, Del, A_7,
(SEQIDNO: 1125)
SYLNILPALFDVLIVASVLKLKI,;
CCDS58101.1, Ins, A_7,
(SEQIDNO: 1126)
SYTKGQRQEEAGPPGECRPGLSP,;
CCDS3424.1, Ins, A_7,
(SEQIDNO: 1127)
TAGCFTGDSYFTHNPNIPGFFSC,;
CCDS9072.1, Ins, A_7,
(SEQIDNO: 1128)
TAPPEACHGPLFLSSAVSSIGCK,;
CCDS58907.1, Ins, A_7,
(SEQIDNO: 1129)
TFYPSLPGTFQEDVCVKRRPMAL,;
CCDS9822.2, Del, A_7,
(SEQIDNO: 1130)
TKQMRVFSGWRYTKRSLKQCPNL,;
CCDS4330.1, Del, A_7,
(SEQIDNO: 1131)
VLNWRKNGSLNLRQSPKRRKSPP,;
CCDS53868.1, Del, A_7,
(SEQIDNO: 1132)
WNLFPRSLSLQKIMMDLNHPESI,;
CCDS10030.1, Del, A_7,
(SEQIDNO: 1133)
WNLSNQVPPKMLPRKSWKTGWTA,;
CCDS41692.1, Del, A_7,
(SEQIDNO: 1134)
WVKNLQKSQNLFCRYYFCGTSGY,;
CCDS45820.1, Ins, A_7,
(SEQIDNO: 1135)
CCYLEIKYILFCWEKLLTTYVQ,;
CCDS32146.1, Ins, A_7,
(SEQIDNO: 1136)
CWHLCSSSTLLSLCGRSKVSAR,;
CCDS31964.1, Del, A_7,
(SEQIDNO: 1137)
DFKKTLEEKHLESISNTKPLSS,;
CCDS895.1, Ins, A_7,
(SEQIDNO: 1138)
DGAFGLLCWGNVCTRSRWFQSR,;
CCDS11923.2, Del, A_7,
(SEQIDNO: 1139)
DSPLKRWWKRSCQRKPWLLESP,;
CCDS43513.2, Del, A_7,
(SEQIDNO: 1140)
EKVNHLSIPIHKVTVQLLATLE,;
CCDS46393.1, Del, A_7,
(SEQIDNO: 1141)
ELVSTGIMTFHLLSVDIYQEAT,;
CCDS35067.1, Del, A_7,
(SEQIDNO: 1143)
FILEGNTLNVLNVEKLSQGNQH,;
CCDS6149.1, Del, A_7,
(SEQIDNO: 1144)
FLERPLYQALNPSFMQEISKRN,;
CCDS3585.1, Del, A_7,
(SEQIDNO: 1145)
FQEIVTSSSLRQAFHSALTSVQ,;
CCDS9498.1, Ins, A_7,
(SEQIDNO: 1146)
GASRDEKESARRGTQREPPILR,;
CCDS34225.1, Del, A_7,
(SEQIDNO: 1147)
GHAAALCLMPRSYMRMPKWQGR,;
CCDS31920.1, Del, A_7,
(SEQIDNO: 1148)
GKCFGRARKKGTNPNLLKYGKN,;
CCDS34908.1, Del, A_7,
(SEQIDNO: 1149)
HLHRMLYMNRLQPSTQWYKITA,;
CCDS43423.1, Ins, A_7,
(SEQIDNO: 1152)
IPFVRRHVSSYERPCKDTLDCG,;
CCDS9375.1, Del, A_7,
(SEQIDNO: 1153)
KIVMEEVTQKHRKKKVFRNRIH,;
CCDS41715.1, Ins, A_7,
(SEQIDNO: 1154)
KVTQKTEEKQKGSHRYNSRFLE,;
CCDS55861.1, Ins, A_7,
(SEQIDNO: 1155)
LCGNAKLSQRWVPCTSKHYLAF,;
CCDS43209.1, Del, A_7,
(SEQIDNO: 1156)
LGWKRVLRHHWIPRRNQLGFFQ,;
CCDS4912.1, Del, A_7,
(SEQIDNO: 1158)
LPLVFMILLRKTTKLLTQISGN,;
CCDS6277.1, Del, A_7,
(SEQIDNO: 1159)
LSVMELEIHVYHTLGSLQPQAL,;
CCDS43515.1, Del, A_7,
(SEQIDNO: 1160)
LWKKQKREKSSWQTSGRWCRRC,;
CCDS14525.2, Ins, A_7,
(SEQIDNO: 1161)
NDYYRGFIAQPRSHLELFHFQP,;
CCDS8597.1, Ins, A_7,
(SEQIDNO: 1162)
NERVSRSQLCSRSQAWTPPQLL,;
CCDS54352.1, Ins, A_7,
(SEQIDNO: 1163)
NGCYSVWKNTIFNCTRSFTQFP,;
CCDS45410.1, Ins, A_7,
(SEQIDNO: 1164)
NGQEDPAGVQNQDAELRMEIQL,;
CCDS3954.1, Ins, A_7,
(SEQIDNO: 1165)
NHADICYTAVETEQRKIQLPAQ,;
CCDS44852.1, Ins, A_7,
(SEQIDNO: 1166)
NKCNRKHSEELIKRHADPEGSN,;
CCDS33307.1, Ins, A_7,
(SEQIDNO: 1167)
NRIRENKCHCKCCQNTDTGCPE,;
CCDS43187.1, Ins, A_7,
(SEQIDNO: 1168)
NRYFLYQSSKNKYLWTAQSCLL,;
CCDS53935.1, Del, A_7,
(SEQIDNO: 1169)
PIPCGSGSIQRWGPMYKVYLNM,;
CCDS34725.1, Ins, A_7,
(SEQIDNO: 1170)
PTEIGRASRKPLHCCSQKYNRN,;
CCDS6726.1, Del, A_7,
(SEQIDNO: 1172)
QHFSNSATTLPSKDPGFGHPTQ,;
CCDS43284.2, Del, A_7,
(SEQIDNO: 1173)
QSQQFLGVHIILICLQVAVLII,;
CCDS13117.1, Del, A_7,
(SEQIDNO: 1174)
RKRKKTLFNILQTLLSKKNKGH,;
CCDS4518.1, Del, A_7,
(SEQIDNO: 1175)
RVRLLFFMYIIMLLCLTSGGVS,;
CCDS47380.1, Del, A_7,
(SEQIDNO: 1176)
SAIKQRKQRTMWSGKPSLWSSG,;
CCDS5929.1, Ins, A_7,
(SEQIDNO: 1177)
SASANYLWLRANTKTSCNSQKD,;
CCDS30787.1, Del, A_7,
(SEQIDNO: 1178)
SFEIQQNNFKNIIGKDYAINSI,;
CCDS34207.1, Ins, A_7,
(SEQIDNO: 1179)
SIFKYVYTCKDPPNTTSYLKEH,;
CCDS42395.1, Del, A_7,
(SEQIDNO: 1180)
SNWQKRCVPQWIPRSARRRSGP,;
CCDS43309.1, Del, A_7,
(SEQIDNO: 1181)
SRSALKKMLLHESKGRKDGGNC,;
CCDS7480.1, Del, A_7,
(SEQIDNO: 1182)
SSQESLQWQTLQNMPVITFVLC,;
CCDS46935.1, Del, A_7,
(SEQIDNO: 1183)
SWRKFRKKQPFSRSWKIWNWVF,;
CCDS11155.1, Del, A_7,
(SEQIDNO: 1184)
TCNSRFKLKLTAWLMQRKGVTS,;
CCDS11156.1, Del, A_7,
(SEQIDNO: 1185)
TCSSKFRLKPKAWLMQRKGVTS,;
CCDS55053.1, Ins, A_7,
(SEQIDNO: 1186)
TGKERKTCGTSKVTKERTLSSK,;
CCDS12272.1, Del, A_7,
(SEQIDNO: 1187)
TLERNPTNVNSVEKPLYITSLF,;
CCDS44926.1, Del, A_7,
(SEQIDNO: 1188)
TLKNMPWLIKIFSKIKKAGIRF,;
CCDS31441.1, Del, A_7,
(SEQIDNO: 1189)
TQKLKVSNQQLYKLFLKGKKRS,;
CCDS31195.1, Ins, A_7,
(SEQIDNO: 1190)
VHHHKQCHWEEAHICHRFSQDQ,;
CCDS47161.1, Ins, A_7,
(SEQIDNO: 1192)
WDAYGTAFKVFERFCIQHSGYQ,;
CCDS4138.1, Del, A_7,
(SEQIDNO: 1193)
WDQRKRKMGKVISKGNDLSKTG,;
CCDS33943.1, Del, A_7,
(SEQIDNO: 1194)
WTRSQKGKASLTIGGWRICCSL,;
CCDS43242.1, Del, A_7,
(SEQIDNO: 1195)
YVNMTACLLCTSAAWAQLLVKY,;
CCDS3892.1, Ins, A_7,
(SEQIDNO: 1196)
APARYYSRNVIYSSEDSYSSR,;
CCDS765.1, Ins, A_7,
(SEQIDNO: 1198)
CPREVEPCGWHCYCTLLSPQV,;
CCDS43419.1, Ins, A_7,
(SEQIDNO: 1199)
CTQKTQPKEYKQETEKPANNS,;
CCDS47168.1, Del, A_7,
(SEQIDNO: 1200)
CVMLQQDLKYTCPFQIEFPKL,;
CCDS55918.1, Del, A_7,
(SEQIDNO: 1201)
DCCHGNSRCRSSFGLSLGKPF,;
CCDS41948.1, Del, A_7,
(SEQIDNO: 1202)
DDFGSHQILITKMTTSRLAVR,;
CCDS892.1, Ins, A_7,
(SEQIDNO: 1203)
ERFGQTSSIRVWRICHQAHLG,;
CCDS1533.1, Del, A_7,
(SEQIDNO: 1204)
GLPAPSVLLSWRWMKLNLGQL,;
CCDS1767.2, Del, A_7,
(SEQIDNO: 1205)
HIITTNLNAPKDLVWLYSVRI,;
CCDS1113.2, Ins, A_7,
(SEQIDNO: 1206)
HKGGRGPSQTESRKKHRSWER,;
CCDS31166.1, Del, A_7,
(SEQIDNO: 1207)
HLLLRRMCVAPITQVITSSNL,;
CCDS43341.1, Del, A_7,
(SEQIDNO: 1208)
HRDCFSKISNLQKIKLEKQAS,;
CCDS32146.1, Ins, A_7,
(SEQIDNO: 1209)
ICNSDITLYVYRRGGPLCFAL,;
CCDS55520.1, Ins, A_7,
(SEQIDNO: 1210)
KGMGAEESRSPARRRSLFFRL,;
CCDS34204.1, Del, A_7,
(SEQIDNO: 1211)
KLFLVREVQRGEKQELRRIKQ,;
CCDS34908.1, Del, A_7,
(SEQIDNO: 1212)
KLKALSFFSAEEQTQISETST,;
CCDS12945.1, Ins, A_7,
(SEQIDNO: 1213)
KLLQKFYGNKTQESLCRKEAF,;
CCDS34471.1, Ins, A_7,
(SEQIDNO: 1214)
KPNLSHTSYLHGEHSPVPLDC,;
CCDS10860.1, Ins, A_7,
(SEQIDNO: 1215)
KPVSTFYLYTSFDEARTQRRD,;
CCDS14466.1, Ins, A_7,
(SEQIDNO: 1216)
KRKKEKEKEEILSVFIFFIKL,;
CCDS34330.1, Del, A_7,
(SEQIDNO: 1217)
LGTRIQDLDIMRRRRCGQTPT,;
CCDS5750.1, Del, A_7,
(SEQIDNO: 1218)
LKSQLMPEGKPKCYKMKQKLF,;
CCDS44410.1, Ins, A_7,
(SEQIDNO: 1219)
LSGCLTGQCSQFSHVCCKYDV,;
CCDS10167.1, Del, A_7,
(SEQIDNO: 1220)
LVSFIFRLIICSLNITEHEKL,;
CCDS47688.1, Del, A_7,
(SEQIDNO: 1221)
MPVVSSTDDPLAVQFLASLTC,;
CCDS30888.1, Del, A_7,
(SEQIDNO: 1222)
MQEWKRYLEASLKTPVSCVES,;
CCDS41500.1, Ins, A_7,
(SEQIDNO: 1223)
NERDYILLGFYPSEIRITSAR,;
CCDS1197.1, Ins, A_7,
(SEQIDNO: 1224)
NGEEGKTEAQYGGTEEGSGHG,;
CCDS53743.1, Ins, A_7,
(SEQIDNO: 1225)
NGFLPECKRQQSIRTQLLVPK,;
CCDS3397.1, Ins, A_7,
(SEQIDNO: 1226)
NHQDHQSGKEKAVHRRADLLS,;
CCDS8336.2, Del, A_7,
(SEQIDNO: 1227)
NIYGIQSLHLLAVQSVSPFTS,;
CCDS7587.1, Ins, A_7,
(SEQIDNO: 1228)
NKNNSKLYFTRRIRHTFFRGI,;
CCDS47812.1, Ins, A_7,
(SEQIDNO: 1229)
NPCQRSSAGAYGRDRKFEETT,;
CCDS229.2, Ins, A_7,
(SEQIDNO: 1230)
NPEQYPGDAGADEPDSVCGGL,;
CCDS9504.1, Del, A_7,
(SEQIDNO: 1231)
NPIQTSIRSFPGVAPQIPRIS,;
CCDS58338.1, Ins, A_7,
(SEQIDNO: 1232)
NRCGLQLAQKLPESPHNYPSD,;
CCDS10606.1, Ins, A_7,
(SEQIDNO: 1233)
NRIEPPASMLGQIKRENSCTD,;
CCDS2384.1, Ins, A_7,
(SEQIDNO: 1234)
NRSSGPLSLQEIHFKTCYQIY,;
CCDS33803.1, Ins, A_7,
(SEQIDNO: 1235)
NYEEEKILSHSETNVIPSGNL,;
CCDS9982.1, Ins, A_7,
(SEQIDNO: 1236)
PLHPGSQEKSSDRGANSDHIY,;
CCDS31874.1, Ins, A_7,
(SEQIDNO: 1237)
PYTTGASNSTNREAEESVRKS,;
CCDS43242.1, Ins, A_7,
(SEQIDNO: 1238)
QDGWGVGSSAISGTPFERKGY,;
CCDS9819.1, Del, A_7,
(SEQIDNO: 1239)
QRHSVRPRIRRTLSPVKNVAG,;
CCDS41815.1, Del, A_7,
(SEQIDNO: 1240)
QRMQLPLLMWTTSQVRNCNNI,;
CCDS59105.1, Del, A_7,
(SEQIDNO: 1241)
QTFCLIIPLYCKNQKTTKVLS,;
CCDS35085.1, Ins, A_7,
(SEQIDNO: 1242)
RFKERQGYRERKRRKARCKER,;
CCDS5398.1, Del, A_7,
(SEQIDNO: 1243)
RMERVKKLKRQSLKNLSWKKY,;
CCDS7405.1, Del, A_7,
(SEQIDNO: 1244)
RTALITHTLCCWLTWAQVSAF,;
CCDS47495.1, Ins, A_7,
(SEQIDNO: 1245)
RTNCYQCCGSFAAEQGPGGHE,;
CCDS34101.1, Ins, A_7,
(SEQIDNO: 1246)
RYPPAYGPDGKPRPRFNNVQL,;
CCDS34225.1, Ins, A_7,
(SEQIDNO: 1247)
SGRYKDEWSSPVIEYCLCCKG,;
CCDS3131.1, Del, A_7,
(SEQIDNO: 1248)
SKRQTTKWSLQQMEFCGQIKD,;
CCDS10362.1, Del, A_7,
(SEQIDNO: 1249)
SMIENRPDTRRLASTLDTLIM,;
CCDS2800.1, Del, A_7,
(SEQIDNO: 1250)
SQIPWRLGTRPTCLRSLSHSL,;
CCDS53353.1, Del, A_7,
(SEQIDNO: 1251)
SRISGSKLAAIDPSPLTIYST,;
CCDS30942.1, Del, A_7,
(SEQIDNO: 1252)
SRLIQFLYCVERKWKTQGGIT,;
CCDS41813.1, Ins, A_7,
(SEQIDNO: 1253)
SSECRGFLSYVQILHLTESRR,;
CCDS644.1, Ins, A_7,
(SEQIDNO: 1255)
TKTVSEGISFDISEKISNHGE,;
CCDS4541.1, Ins, A_7,
(SEQIDNO: 1256)
TSIQLVCLWNTFPFTWEFFNP,;
CCDS47584.1, Ins, A_7,
(SEQIDNO: 1257)
TSLFIKWLTYKLCQYLLERCN,;
CCDS6257.1, Del, A_7,
(SEQIDNO: 1258)
VAAVAAATLGSRVPSTQTQLH,;
CCDS1504.1, Del, A_7,
(SEQIDNO: 1259)
VLNCFLWSLNGKILSSRKSKI,;
CCDS41630.1, Del, A_7,
(SEQIDNO: 1261)
VSAAYYFLNKLQIFCKSVMIL,;
CCDS43714.1, Del, A_7,
(SEQIDNO: 1262)
VVEGGGYLSPIQLRFPKENLL,;
CCDS46028.1, Del, A_7,
(SEQIDNO: 1263)
VVKVWMRVKYTKEVIMDLTNV,;
CCDS45410.1, Del, A_7,
(SEQIDNO: 1264)
WPRGSSRCTKPRRGAQDGNPT,;
CCDS683.1, Del, A_7,
(SEQIDNO: 1265)
YKMMLVFAFSLSQMMGQHPKG,;
CCDS35277.1, Del, A_7,
(SEQIDNO: 1266)
YSLSKASAENFLSCGRPSEGC,;
CCDS3211.1, Del, A_7,
(SEQIDNO: 1267)
YSYPSSLSVFSVPGYHLYYFR,;
CCDS2219.1, Del, A_7,
(SEQIDNO: 1268)
ADPHLSSPPLMMNKSRSSQE,;
CCDS13585.1, Del, A_7,
(SEQIDNO: 1269)
AFFIHTVRKQTLNFHFWTRGI,;
CCDS12328.1, Del, A_7,
(SEQIDNO: 1270)
AKPRNLLLKRRRKIIAATAM,;
CCDS3738.1, Del, A_7,
(SEQIDNO: 1272)
CMRNLDNLLGKMQKKITGMG,;
CCDS34037.1, Del, A_7,
(SEQIDNO: 1273)
CWILMRQSLFVGTFMDNSLI,;
CCDS34100.1, Del, A_7,
(SEQIDNO: 1274)
DILRHMAQTANQDPASIMFN,;
CCDS44805.1, Del, A_7,
(SEQIDNO: 1275)
DSLKVLLVFQLVQCLVQRWL,;
CCDS7805.1, Del, A_7,
(SEQIDNO: 1276)
DVHQKQRRKRLPSQNVCLHQ,;
CCDS1767.2, Del, A_7,
(SEQIDNO: 1277)
EDMLDWDCLHHHLYPVIQQG,;
CCDS11983.1, Ins, A_7,
(SEQIDNO: 1278)
ETTESTSRCHCYRTTKCEME,;
CCDS11070.1, Ins, A_7,
(SEQIDNO: 1279)
ETTRRSQLLSRREEKSAGNG,;
CCDS11870.2, Del, A_7,
(SEQIDNO: 1280)
FCSIMTNKIRSNPIHLWYWT,;
CCDS9300.2, Del, A_7,
(SEQIDNO: 1281)
GISLVLIQHYQCYRTPLFML,;
CCDS7258.1, Del, A_7,
(SEQIDNO: 1282)
GNTANGPGIGRKSLMPMQVT,;
CCDS1838.1, Del, A_7,
(SEQIDNO: 1283)
GVTAMHFIIPVLYDYKRVIL,;
CCDS32915.1, Del, A_7,
(SEQIDNO: 1284)
GVTRTLNMSTKTPEEASGVS,;
CCDS4071.2, Ins, A_7,
(SEQIDNO: 1286)
IEKEVRRRIVMFQGELPLCS,;
CCDS32967.1, Del, A_7,
(SEQIDNO: 1287)
IFSTRMRRHVGTQTRAPPSG,;
CCDS55093.1, Del, A_7,
(SEQIDNO: 1288)
IKPFSTNSVLRRTGSSIEEL,;
CCDS58957.1, Ins, A_7,
(SEQIDNO: 1289)
IQAALDIACCRPAFRHAEWR,;
CCDS32073.1, Ins, A_7,
(SEQIDNO: 1290)
ISSSVNDQPPCTKFIWNTKR,;
CCDS32686.1, Del, A_7,
(SEQIDNO: 1291)
IVLPHLPTQPNACTGTSLRN,;
CCDS1336.1, Ins, A_7,
(SEQIDNO: 1292)
KAKGKTESPRSQSDQAVRVI,;
CCDS907.1, Ins, A_7,
(SEQIDNO: 1293)
KCIKCSPVIRLGTFISSKKI,;
CCDS53871.1, Del, A_7,
(SEQIDNO: 1294)
KRKNKIERVAILIWKALMKI,;
CCDS5230.1, Ins, A_7,
(SEQIDNO: 1295)
KRRCHSLGIIQKDGDAQEAC,;
CCDS3598.1, Ins, A_7,
(SEQIDNO: 1296)
KTYLRKELQDDQEEKGFTIN,;
CCDS47757.1, Del, A_7,
(SEQIDNO: 1297)
KYKKFKELLMQKMKGLASYL,;
CCDS32146.1, Del, A_7,
(SEQIDNO: 1298)
LASMFVLDSSLPMWKKQSQC,;
CCDS47063.1, Del, A_7,
(SEQIDNO: 1299)
LFHLKGRRQQLKATKEYRSF,;
CCDS9477.1, Del, A_7,
(SEQIDNO: 1300)
LGKNRRNLHLRKMNHILLMC,;
CCDS10540.1, Del, A_7,
(SEQIDNO: 1301)
LICHQIKISLFLKVTMMMLC,;
CCDS899.1, Del, A_7,
(SEQIDNO: 1302)
LQDLRLVLRFGKAFALSPNS,;
CCDS14237.2, Del, A_7,
(SEQIDNO: 1303)
LQILKLILKRARLLEGVWWM,;
CCDS43349.1, Del, A_7,
(SEQIDNO: 1304)
LSSKKKSCFMLEKTENKIVW,;
CCDS33356.1, Ins, A_7,
(SEQIDNO: 1305)
NCAEGGKTVLWDRWCRSKLH,;
CCDS5605.1, Ins, A_7,
(SEQIDNO: 1306)
NEDSENDWSINIVSILRLAG,;
CCDS11260.1, Ins, A_7,
(SEQIDNO: 1307)
NHGKFWYPNGFKKWQFTVTH,;
CCDS11672.1, Del, A_7,
(SEQIDNO: 1308)
NHIFDMNLLDMIEVGGNTGS,;
CCDS14246.1, Ins, A_7,
(SEQIDNO: 1309)
NKEDFSVQKSPLNKSKDCQE,;
CCDS3974.1, Ins, A_7,
(SEQIDNO: 1310)
NSSLLRRAWPMLSFPSNRCS,;
CCDS7824.1, Ins, A_7,
(SEQIDNO: 1311)
NTCITSYSYSEPFLFSTALF,;
CCDS8772.1, Ins, A_7,
(SEQIDNO: 1312)
NTETTGCHNYFKRQDHDTQP,;
CCDS8558.1, Del, A_7,
(SEQIDNO: 1314)
PLKLRRQQQPQPHLRTLSNT,;
CCDS10654.1, Del, A_7,
(SEQIDNO: 1315)
PPQPMGPPPECCSSWLRRIE,;
CCDS5063.1, Del, A_7,
(SEQIDNO: 1316)
PSAMCQLQDCFQICTNPVIS,;
CCDS34698.1, Del, A_7,
(SEQIDNO: 1317)
PSQEREVQGRRGKDWEEASV,;
CCDS33307.1, Del, A_7,
(SEQIDNO: 1318)
QDSRKQVPLQMLPKYRHWMP,;
CCDS46851.1, Del, A_7,
(SEQIDNO: 1319)
QNSYRTSQKRRGHWPVKFVT,;
CCDS56280.1, Del, A_7,
(SEQIDNO: 1321)
QVNYQSVKLQAFSKLIFRMV,;
CCDS34171.1, Ins, A_7,
(SEQIDNO: 1322)
RETSQKGKKEEKKGKAFFYT,;
CCDS1389.1, Del, A_7,
(SEQIDNO: 1323)
RFRNSTRLPLLFRSIVKPLK,;
CCDS13092.1, Ins, A_7,
(SEQIDNO: 1324)
RGVSGQIGNTCCRAFSGEDT,;
CCDS46430.1, Ins, A_7,
(SEQIDNO: 1325)
RKGTSKAVAKEKLGSLKKHT,;
CCDS55858.1, Ins, A_7,
(SEQIDNO: 1326)
RKRSLSTSSAGAYRSSEIKK,;
CCDS8884.1, Ins, A_7,
(SEQIDNO: 1327)
SCGGTRKTRKRCSRRSRKRG,;
CCDS612.1, Ins, A_7,
(SEQIDNO: 1328)
SKCSTYTIRNIQKAGSRSSC,;
CCDS390.1, Del, A_7,
(SEQIDNO: 1329)
SKLQMIWAFYLKMMYHIFWG,;
CCDS43501.1, Del, A_7,
(SEQIDNO: 1330)
SKRRKAIVTAQTIALIVIHH,;
CCDS31783.1, Del, A_7,
(SEQIDNO: 1331)
SLRWVGRSWIFTVSTPESLL,;
CCDS13473.2, Del, A_7,
(SEQIDNO: 1332)
SLSLPRWCATGSTRTCLPRP,;
CCDS6252.1, Del, A_7,
(SEQIDNO: 1333)
SPQWVVHFHEDAAVHILPLE,;
CCDS9049.1, Del, A_7,
(SEQIDNO: 1334)
SQILTSYIFGKQTAFLFASG,;
CCDS10159.1, Ins, A_7,
(SEQIDNO: 1335)
SQKGASWFAFFCICTIPKFR,;
CCDS34501.1, Ins, A_7,
(SEQIDNO: 1336)
SQSIWKRRCENELHRSDLYW,;
CCDS43162.1, Del, A_7,
(SEQIDNO: 1337)
SREKALNSIYHSKKVMGFIK,;
CCDS47443.1, Ins, A_7,
(SEQIDNO: 1338)
SSHCTAFFWCRGFRKIFGRH,;
CCDS3556.1, Del, A_7,
(SEQIDNO: 1339)
SSWQVLFMNIQEDILSLLSQ,;
CCDS44525.1, Del, A_7,
(SEQIDNO: 1340)
SWLKKNRGSCRSWRRMRGSS,;
CCDS389.1, Del, A_7,
(SEQIDNO: 1341)
TFLNNLIRFLSLNQYGKILV,;
CCDS46028.1, Ins, A_7,
(SEQIDNO: 1342)
TFQMYRMWQSFQPVLNPCYT,;
CCDS6080.1, Del, A_7,
(SEQIDNO: 1343)
TFRCYKIITWIIFLSQKKMF,;
CCDS5746.1, Del, A_7,
(SEQIDNO: 1344)
TMLALLNPSQGGFCLLNFHL,;
CCDS10374.2, Ins, A_7,
(SEQIDNO: 1345)
TRELQEKRGRNQTMVRESFS,;
CCDS58012.1, Ins, A_7,
(SEQIDNO: 1346)
TRVLYEFLQPGSQRVLPVCL,;
CCDS1177.1, Ins, A_7,
(SEQIDNO: 1347)
VPRRCLSRQTNRTCQRYAIT,;
CCDS10620.1, Del, A_7,
(SEQIDNO: 1348)
VTPMVGPFISEPSLSSSQKL,;
CCDS11103.1, Del, A_7,
(SEQIDNO: 1349)
VTRRRSIRQTQISVTLGRSL,;
CCDS7258.1, Del, A_7,
(SEQIDNO: 1350)
YRRASYPSTKFLLEKNSRRP,;
CCDS33737.1, Ins, A_7,
(SEQIDNO: 1351)
ATAPRANQTTVPESITGPL,;
CCDS43729.1, Del, A_7,
(SEQIDNO: 1352)
ATSMTHQDLKSASHTKSPN,;
CCDS6004.1, Del, A_7,
(SEQIDNO: 1353)
AVMHNIRISKLEMKRISTS,;
CCDS43758.1, Del, A_7,
(SEQIDNO: 1354)
CLQACNLSQILRLALQLCL,;
CCDS731.1, Ins, A_7,
(SEQIDNO: 1356)
DFHERLCSRIIQKISYLHM,;
CCDS42670.1, Del, A_7,
(SEQIDNO: 1357)
DFRNMNMFYIQELQALLLW,;
CCDS46222.1, Del, A_7,
(SEQIDNO: 1358)
EKHKINSPRNLLLNESHLP,;
CCDS9379.1, Del, A_7,
(SEQIDNO: 1359)
EMKKKKKPVALRKNLYLKN,;
CCDS9030.1, Del, A_7,
(SEQIDNO: 1360)
ETIYLRQLSQFLSNPAMKS,;
CCDS2702.1, Del, A_7,
(SEQIDNO: 1361)
EVKKNPSLNGNALIQKKEL,;
CCDS1278.1, Del, A_7,
(SEQIDNO: 1362)
FHQQLNSAAPQLRKWLKRF,;
CCDS45827.1, Del, A_7,
(SEQIDNO: 1363)
FIRKLRIIQLVIRKQLLKS,;
CCDS11963.1, Del, A_7,
(SEQIDNO: 1364)
FLHLTRKDGSKLPLLFYLE,;
CCDS34283.1, Del, A_7,
(SEQIDNO: 1365)
FLVSRTSLNKSYSYSRSHC,;
CCDS32519.2, Del, A_7,
(SEQIDNO: 1367)
GRRRPRGLARGTINIRVRA,;
CCDS41329.1, Del, A_7,
(SEQIDNO: 1368)
HIIQDWWTKIVSLMQLLSN,;
CCDS41953.1, Ins, A_7,
(SEQIDNO: 1369)
IIIRICTTFEKSGGGTRGG,;
CCDS3131.1, Ins, A_7,
(SEQIDNO: 1370)
IPKGKPQSGLCSRWNFVAR,;
CCDS53945.1, Del, A_7,
(SEQIDNO: 1371)
ISLTSFLTGWMMYLHIQKL,;
CCDS43426.1, Del, A_7,
(SEQIDNO: 1372)
KENIFVSIAIEHVQSLVCF,;
CCDS30920.1, Ins, A_7,
(SEQIDNO: 1373)
KFSRCRLSTAATEPRGLCQ,;
CCDS58290.1, Ins, A_7,
(SEQIDNO: 1374)
KISNKITFSQVPFVIQVQV,;
CCDS2194.1, Del, A_7,
(SEQIDNO: 1375)
KLANMQNIPLQVYLCQNQI,;
CCDS4118.1, Ins, A_7,
(SEQIDNO: 1376)
KRSAWGFEILEKGNEHEVQ,;
CCDS10932.1, Ins, A_7,
(SEQIDNO: 1377)
KSANQGVYLVQQRLGHPRH,;
CCDS53626.1, Ins, A_7,
(SEQIDNO: 1378)
KSFPRVQWHAQDKQIGIWK,;
CCDS46776.1, Ins, A_7,
(SEQIDNO: 1379)
KSGFWKSLLISFIFSEVRR,;
CCDS9095.1, Del, A_7,
(SEQIDNO: 1380)
LASLQNQKKNKKKLQTHLK,;
CCDS41470.1, Del, A_7,
(SEQIDNO: 1381)
LGIRAGSLMLICKSLTEQF,;
CCDS54103.1, Del, A_7,
(SEQIDNO: 1382)
LKKNSLGIIWPKSGLILTA,;
CCDS3756.1, Del, A_7,
(SEQIDNO: 1383)
LKNFCRVLYILSKCSSTLL,;
CCDS14502.1, Del, A_7,
(SEQIDNO: 1384)
LLYKLKLEQRGRLLVLLGL,;
CCDS10239.1, Del, A_7,
(SEQIDNO: 1386)
LSFCNQHVEDSEQDKDLKL,;
CCDS8253.1, Del, A_7,
(SEQIDNO: 1387)
LSKKKVIPSRKMSNPLKLR,;
CCDS10622.1, Del, A_7,
(SEQIDNO: 1388)
LTMTPESIQVPNVEMKRMN,;
CCDS47584.1, Del, A_7,
(SEQIDNO: 1389)
LTWSKWRNPFSPWKLPCIS,;
CCDS47542.1, Ins, A_7,
(SEQIDNO: 1390)
MEPSTKPTTSGFCVHGRAE,;
CCDS43483.1, Ins, A_7,
(SEQIDNO: 1391)
MFNPFRGFAKKLQTSYYFE,;
CCDS46227.1, Del, A_7,
(SEQIDNO: 1392)
MKKTPNLQTMRTIRRTGNY,;
CCDS5447.1, Del, A_7,
(SEQIDNO: 1393)
MPFLVKLISNRKCRNSITK,;
CCDS5931.1, Del, A_7,
(SEQIDNO: 1394)
MRIKIMLTLLAHRLLLTQT,;
CCDS54757.1, Ins, A_7,
(SEQIDNO: 1395)
NAKASLYLRWTACPGWAPQ,;
CCDS5452.1, Ins, A_7,
(SEQIDNO: 1396)
NEKHEIRKDIGITSTKSLS,;
CCDS45822.1, Ins, A_7,
(SEQIDNO: 1397)
NGKYSEVGELYLEITSCVE,;
CCDS4966.1, Ins, A_7,
(SEQIDNO: 1398)
NITGSNFSTNFQALNSFFE,;
CCDS53775.1, Ins, A_7,
(SEQIDNO: 1399)
NKGSPNETNERRTRESQTD,;
CCDS4153.1, Ins, A_7,
(SEQIDNO: 1400)
NKRLNGDRRKSQGSNNCIL,;
CCDS59214.1, Ins, A_7,
(SEQIDNO: 1401)
NQEKLKEVSYTTPHFASCS,;
CCDS33993.1, Ins, A_7,
(SEQIDNO: 1402)
NQQDRNRQLSKPLLRNTKK,;
CCDS10111.1, Ins, A_7,
(SEQIDNO: 1403)
NSREDKRERTATEEKARRN,;
CCDS30978.1, Ins, A_7,
(SEQIDNO: 1404)
NSSFATHCCQQRTIRGACR,;
CCDS59085.1, Ins, A_7,
(SEQIDNO: 1405)
NTGSIGENGRYNSSTNQIQ,;
CCDS671.1, Ins, A_7,
(SEQIDNO: 1406)
PYQHCLNNSTLPFESKSNG,;
CCDS8438.1, Ins, A_7,
(SEQIDNO: 1407)
QAHFGITHPENGLLSSTSQ,;
CCDS13414.1, Del, A_7,
(SEQIDNO: 1408)
QCISLLTLTLGCSPPITTT,;
CCDS3928.1, Del, A_7,
(SEQIDNO: 1409)
QDTLRNLLLQTTLTCWWIH,;
CCDS47630.1, Del, A_7,
(SEQIDNO: 1410)
QEYADMIESLRLMKLFDSV,;
CCDS30780.1, Del, A_7,
(SEQIDNO: 1411)
QKLKSTGMLQAVLQITHSF,;
CCDS45021.1, Ins, A_7,
(SEQIDNO: 1412)
QKQPNFCIPGGSSEKSVTF,;
CCDS3625.1, Ins, A_7,
(SEQIDNO: 1413)
QRQYWFSPFGQENKSRAII,;
CCDS9265.1, Del, A_7,
(SEQIDNO: 1414)
QSWAEFLRKPDLLSLSQSQ,;
CCDS58338.1, Del, A_7,
(SEQIDNO: 1415)
QVWITTGSETTRIPTQLSQ,;
CCDS42207.1, Ins, A_7,
(SEQIDNO: 1416)
RDSIQFRAEVDGGEMQSED,;
CCDS34171.1, Del, A_7,
(SEQIDNO: 1417)
REKRKSILLHLIVLNSPES,;
CCDS53776.1, Ins, A_7,
(SEQIDNO: 1418)
RFREVEKKRKEEEKKATET,;
CCDS6683.1, Del, A_7,
(SEQIDNO: 1419)
RMISKSLTVKGLMELYHLR,;
CCDS4306.1, Ins, A_7,
(SEQIDNO: 1420)
RQRKKRKEEESKKGLNQRF,;
CCDS34723.1, Ins, A_7,
(SEQIDNO: 1421)
RQRYFKRKRYTKSEYYFGL,;
CCDS7142.1, Ins, A_7,
(SEQIDNO: 1422)
RRGKSERGGRGYGGTKICW,;
CCDS43042.1, Ins, A_7,
(SEQIDNO: 1423)
RRHRSQMHRTGENWKRFQL,;
CCDS34472.1, Ins, A_7,
(SEQIDNO: 1424)
RYMLLSKAICVPFNTFQCF,;
CCDS42794.1, Ins, A_7,
(SEQIDNO: 1426)
SKIKGGRFQAAHSSHSSDL,;
CCDS34374.1, Del, A_7,
(SEQIDNO: 1427)
SKTNSRLIGKKMKTDSSKA,;
CCDS4117.1, Del, A_7,
(SEQIDNO: 1428)
SQFRFGKLKSSKKGRKFSS,;
CCDS47157.1, Ins, A_7,
(SEQIDNO: 1429)
SRKFKSQRIYDSGWPFWIL,;
CCDS3004.1, Del, A_7,
(SEQIDNO: 1430)
SRWKKIMKFLLALNKIMMR,;
CCDS54694.1, Ins, A_7,
(SEQIDNO: 1431)
TGFSGKPSPERMAKLGRLP,;
CCDS3444.1, Del, A_7,
(SEQIDNO: 1432)
THPLLQACSPSACRCPCHQ,;
CCDS12635.1, Del, A_7,
(SEQIDNO: 1433)
TVEKIHPNVKTVGSATRGA,;
CCDS1690.1, Del, A_7,
(SEQIDNO: 1434)
VLTNLWNLNGWKDKKKYLG,;
CCDS43229.1, Ins, A_7,
(SEQIDNO: 1435)
VPEQKPWPGQRVFKRGLLR,;
CCDS45840.1, Del, A_7,
(SEQIDNO: 1436)
VQDLVTNVLPLEVTVLLGR,;
CCDS31466.1, Del, A_7,
(SEQIDNO: 1437)
VTTSVWDGPARTNASNSAG,;
CCDS45703.2, Del, A_7,
(SEQIDNO: 1438)
WRRQSLISRISHFQKLRHI,;
CCDS2110.1, Ins, A_7,
(SEQIDNO: 1439)
YHGPVCGEESTEALSLFPQ,;
CCDS9255.2, Ins, A_7,
(SEQIDNO: 1440)
YKSLPRTAVYYPGRQGSGL,;
CCDS59172.1, Ins, A_7,
(SEQIDNO: 1441)
YSSLKGNYPAGERVCSNII,;
CCDS14498.1, Ins, A_7,
(SEQIDNO: 1442)
YSSLKGNYPARERVCSNII,;
CCDS47170.1, Ins, A_7,
(SEQIDNO: 1443)
YTTFFREATNDGSIRSTKK,;
CCDS47996.1, Del, A_7,
(SEQIDNO: 1445)
AASSWLWASSYLGPSRWD,;
CCDS13662.1, Del, A_7,
(SEQIDNO: 1446)
ASELRTMLKATGRNSVRN,;
CCDS5622.1, Ins, A_7,
(SEQIDNO: 1447)
CFRKRKEAARTTEAIGGQ,;
CCDS3952.1, Del, A_7,
(SEQIDNO: 1448)
CISFNTVLLVSLQNPVKK,;
CCDS42016.1, Del, A_7,
(SEQIDNO: 1449)
CLCYFCTAIEMTTTESYF,;
CCDS42041.1, Del, A_7,
(SEQIDNO: 1450)
DVMQIHLKAHQQQKVKKA,;
CCDS1838.1, Ins, A_7,
(SEQIDNO: 1451)
EELRQCISSSQCCTITRE,;
CCDS33793.1, Del, A_7,
(SEQIDNO: 1452)
EILAEYCVVGAVHAVAQN,;
CCDS46894.1, Ins, A_7,
(SEQIDNO: 1453)
ESFGFGKENRISNFSGVW,;
CCDS2305.1, Del, A_7,
(SEQIDNO: 1455)
FLEKNPMSLLMTGGKRLP,;
CCDS46944.1, Del, A_7,
(SEQIDNO: 1456)
FLKKIYGRNFISAVCIGH,;
CCDS4048.1, Del, A_7,
(SEQIDNO: 1457)
FLLTVNGNVSIHPTKSQL,;
CCDS6494.1, Del, A_7,
(SEQIDNO: 1458)
GKRVAQRLYLKVFLAHHH,;
CCDS54890.1, Ins, A_7,
(SEQIDNO: 1459)
GTAIRTSAEPARTAGLYP,;
CCDS11867.1, Del, A_7,
(SEQIDNO: 1460)
HFWNSTKKRLRTMKIKCS,;
CCDS10142.1, Del, A_7,
(SEQIDNO: 1461)
HILQKTSQVRATILLLIT,;
CCDS45672.1, Del, A_7,
(SEQIDNO: 1462)
HKWLKFCLLRVVKESFHE,;
CCDS3123.1, Del, A_7,
(SEQIDNO: 1463)
HNGYVLQKKLHFTFYTCL,;
CCDS34146.2, Del, A_7,
(SEQIDNO: 1464)
HNLSHLKTSLRLNKANRN,;
CCDS5830.1, Del, A_7,
(SEQIDNO: 1465)
HQRKEILYTDSTRQPGKL,;
CCDS11475.1, Ins, A_7,
(SEQIDNO: 1466)
HRSHGRSCYYTPISSGKL,;
CCDS7602.1, Del, A_7,
(SEQIDNO: 1467)
IAEDLINLTMGDLIALVT,;
CCDS34422.1, Ins, A_7,
(SEQIDNO: 1468)
ILFQNPDSKMWRHCKVSE,;
CCDS41604.1, Ins, A_7,
(SEQIDNO: 1469)
IPKMWRMWQNLYPVLTLY,;
CCDS1770.1, Del, A_7,
(SEQIDNO: 1470)
IVLLSQHFHCLLVKNLKL,;
CCDS9095.1, Ins, A_7,
(SEQIDNO: 1471)
IWQVCKIKRKTRKNYRHI,;
CCDS6243.1, Ins, A_7,
(SEQIDNO: 1472)
KAKEKKLQEFRCYQCETV,;
CCDS2749.2, Del, A_7,
(SEQIDNO: 1473)
KIPILGRMKKFQIVLRLV,;
CCDS3171.1, Ins, A_7,
(SEQIDNO: 1474)
KKNGKSLHKNRWPGCCSS,;
CCDS42366.1, Ins, A_7,
(SEQIDNO: 1475)
KNSKTLGCSGSSHLATIS,;
CCDS31023.1, Ins, A_7,
(SEQIDNO: 1476)
KQESSHEWYSPCRRHGRY,;
CCDS8439.1, Ins, A_7,
(SEQIDNO: 1477)
KRGISSRTGHFESKFSPT,;
CCDS3016.1, Ins, A_7,
(SEQIDNO: 1478)
KRPLCITELSVHILHDYM,;
CCDS9052.1, Ins, A_7,
(SEQIDNO: 1479)
KTKEEEEQRAFCSRGTGT,;
CCDS42292.1, Del, A_7,
(SEQIDNO: 1480)
KTKNQWLASVSLRTASVQ,;
CCDS34470.1, Del, A_7,
(SEQIDNO: 1481)
KVKSSVLQLKLLKKKMRI,;
CCDS14498.1, Del, A_7,
(SEQIDNO: 1482)
LFPQRKLSSKRKSVFKHH,;
CCDS59172.1, Del, A_7,
(SEQIDNO: 1483)
LFPQRKLSSRRKSVFKHH,;
CCDS46878.1, Del, A_7,
(SEQIDNO: 1484)
LKAPMTYLTGTGQVGGKE,;
CCDS53745.1, Del, A_7,
(SEQIDNO: 1485)
LKVFSFFTLHGGAWLLRL,;
CCDS47177.1, Del, A_7,
(SEQIDNO: 1486)
LMWRREQRSGCRCWIQMT,;
CCDS2882.1, Del, A_7,
(SEQIDNO: 1488)
LQFCKQRVKKIMKSGSVQ,;
CCDS44708.1, Ins, A_7,
(SEQIDNO: 1490)
NCSFPAFYRKLKFSLQFI,;
CCDS46954.1, Ins, A_7,
(SEQIDNO: 1491)
NDNGHSCKWKNDKQGANS,;
CCDS14435.1, Ins, A_7,
(SEQIDNO: 1493)
NKEISRFRMHSCPLYGPW,;
CCDS59290.1, Ins, A_7,
(SEQIDNO: 1494)
NKVFAVWGPLSFLLQLQG,;
CCDS3146.1, Ins, A_7,
(SEQIDNO: 1495)
NLSSVQAKSCSFSRRFRL,;
CCDS44839.1, Ins, A_7,
(SEQIDNO: 1496)
NMQCSRVCGNQTNYRCSK,;
CCDS8321.1, Ins, A_7,
(SEQIDNO: 1497)
NPRNAEVPWVGGDREARH,;
CCDS691.1, Ins, A_7,
(SEQIDNO: 1498)
NPWNRFIWKSHVGKTQSH,;
CCDS3228.1, Ins, A_7,
(SEQIDNO: 1499)
NQGGYRGGGKQSFMCNDR,;
CCDS2528.1, Ins, A_7,
(SEQIDNO: 1500)
NRKEQKIEVQAGQTSRLI,;
CCDS45262.1, Ins, A_7,
(SEQIDNO: 1501)
NWRTRSGPDGEHIPRTDH,;
CCDS1113.2, Ins, A_7,
(SEQIDNO: 1502)
NYQEKQWTINENNYPQNK,;
CCDS47155.1, Ins, A_7,
(SEQIDNO: 1503)
PALPALSQGVYTSDRTDK,;
CCDS9344.1, Del, A_7,
(SEQIDNO: 1506)
QDLPLSSICQTNVTIYWQ,;
CCDS41764.1, Del, A_7,
(SEQIDNO: 1507)
QFNLTMKEAGRFYGSSFI,;
CCDS53775.1, Ins, A_7,
(SEQIDNO: 1508)
RFREVEKKRKEEEKKCGW,;
CCDS43513.2, Ins, A_7,
(SEQIDNO: 1509)
RKKSTIYQSRFTRSLSSY,;
CCDS47238.1, Ins, A_7,
(SEQIDNO: 1510)
RNLRRFRGNEHKLSSYFC,;
CCDS46789.2, Ins, A_7,
(SEQIDNO: 1511)
RPITKKYSCPRVITEKSL,;
CCDS6860.1, Ins, A_7,
(SEQIDNO: 1512)
RRKSRENGTRIGGTNQRT,;
CCDS58090.1, Del, A_7,
(SEQIDNO: 1513)
RRQIFLYQVVLQVTFFPS,;
CCDS628.2, Del, A_7,
(SEQIDNO: 1514)
SERSSTVTWMWSIGTSKL,;
CCDS34509.1, Del, A_7,
(SEQIDNO: 1515)
SIHCRRRNQNWLQRKKYS,;
CCDS35325.1, Ins, A_7,
(SEQIDNO: 1516)
SLSFPFRKQHPEEAKALR,;
CCDS33365.1, Ins, A_7,
(SEQIDNO: 1517)
SSYVRCSRVSKSDSSNHL,;
CCDS9693.1, Del, A_7,
(SEQIDNO: 1518)
STLKVMFLLLCQEAVLCV,;
CCDS47539.1, Del, A_7,
(SEQIDNO: 1519)
STTNQHSTAIREFIGEAI,;
CCDS43976.1, Del, A_7,
(SEQIDNO: 1520)
SVRMTSAWYPGMWRRQTR,;
CCDS44954.1, Del, A_7,
(SEQIDNO: 1521)
TAFIWKIWPQTAELLLTS,;
CCDS45284.1, Del, A_7,
(SEQIDNO: 1522)
TCFPPEEWKVTAQPIPGG,;
CCDS4657.1, Del, A_7,
(SEQIDNO: 1524)
AFLMWGVWFNFLHLFSL,;
CCDS3202.1, Del, A_7,
(SEQIDNO: 1525)
AWKLTSRSPFFVWQLMM,;
CCDS31523.1, Del, A_7,
(SEQIDNO: 1527)
CLGKIRLSIKYIFILKN,;
CCDS41774.1, Del, A_7,
(SEQIDNO: 1528)
CRWFQTSPFSPCLLCTS,;
CCDS1605.1, Del, A_7,
(SEQIDNO: 1529)
DSAKNSSQPIPDTSSSA,;
CCDS54321.1, Del, A_7,
(SEQIDNO: 1530)
EHVAPGRMSASPQSPTQ,;
CCDS10916.1, Del, A_7,
(SEQIDNO: 1531)
ERPRAFQPGREDKVASH,;
CCDS7281.1, Del, A_7,
(SEQIDNO: 1532)
ERVSLSLFPVLERRGLR,;
CCDS31756.1, Ins, A_7,
(SEQIDNO: 1533)
FRQLPEEGCKHASAIWF,;
CCDS11915.1, Ins, A_7,
(SEQIDNO: 1534)
GERTSCWRCSRASTKAS,;
CCDS5106.1, Ins, A_7,
(SEQIDNO: 1535)
GGRRGERGDTAQGPEDQ,;
CCDS34146.2, Del, A_7,
(SEQIDNO: 1536)
GKEEELRKSCKKKDVRN,;
CCDS6249.1, Del, A_7,
(SEQIDNO: 1537)
GKGMKKIKKCLHANQQE,;
CCDS1937.1, Del, A_7,
(SEQIDNO: 1538)
GPTRTVMRSPSSLLPRL,;
CCDS47542.1, Del, A_7,
(SEQIDNO: 1539)
GTFDETDHFWILCPWKS,;
CCDS8713.1, Ins, A_7,
(SEQIDNO: 1540)
HRSTKNEKSCGVLDGSK,;
CCDS5369.1, Ins, A_7,
(SEQIDNO: 1541)
IDLYLLSCINLGVRKSL,;
CCDS32685.1, Ins, A_7,
(SEQIDNO: 1542)
IKCRCKALPSWPLSDWT,;
CCDS34531.1, Ins, A_7,
(SEQIDNO: 1543)
IKSRVFGSFGYRQPKGM,;
CCDS53867.1, Del, A_7,
(SEQIDNO: 1544)
IQSKMPRQQIMTAQWLL,;
CCDS58336.1, Ins, A_7,
(SEQIDNO: 1545)
IVKSKDTFWTGISTSQI,;
CCDS31920.1, Ins, A_7,
(SEQIDNO: 1546)
KENALAGQERRGQIPIC,;
CCDS2749.2, Ins, A_7,
(SEQIDNO: 1547)
KFRVFKACRERNNSRSR,;
CCDS34100.1, Ins, A_7,
(SEQIDNO: 1548)
KISSGIWPRRQTKTPLQ,;
CCDS4966.1, Del, A_7,
(SEQIDNO: 1549)
KLIRSQRFRVAILGLNL,;
CCDS2235.1, Del, A_7,
(SEQIDNO: 1550)
KNLIMNQALEQMKTKAD,;
CCDS46928.1, Ins, A_7,
(SEQIDNO: 1551)
KQFGTLQRRIKANSRGT,;
CCDS47225.1, Del, A_7,
(SEQIDNO: 1552)
KSRGKSQSPSLPVLFPS,;
CCDS33124.1, Ins, A_7,
(SEQIDNO: 1553)
KTKSPAFNFEKQRVLVY,;
CCDS30787.1, Ins, A_7,
(SEQIDNO: 1554)
KVSLYYPEAEVFRSFMC,;
CCDS46393.1, Del, A_7,
(SEQIDNO: 1555)
LILGFTDCPIQSLIKWL,;
CCDS31686.1, Del, A_7,
(SEQIDNO: 1556)
LKGHLLLRFSKPQRLKN,;
CCDS5622.1, Del, A_7,
(SEQIDNO: 1557)
LKLTIKSYKRSMLAFSK,;
CCDS58737.1, Ins, A_7,
(SEQIDNO: 1558)
NASRFIPSCNTYHKKQN,;
CCDS43157.1, Ins, A_7,
(SEQIDNO: 1559)
NEESQLEEGARKQEPEP,;
CCDS4949.1, Ins, A_7,
(SEQIDNO: 1560)
NEKKILFLGGMHEPSGG,;
CCDS11312.1, Ins, A_7,
(SEQIDNO: 1561)
NKISSSYQNRKACGKQR,;
CCDS10137.1, Del, A_7,
(SEQIDNO: 1562)
NKKKNFGKGSKRNRKRN,;
CCDS45436.1, Del, A_7,
(SEQIDNO: 1564)
NPSLFMKKSLIAHLIAPQ,;
CCDS44663.1, Ins, A_7,
(SEQIDNO: 1565)
NQLCAPENHRSHPAQSG,;
CCDS6147.1, Ins, A_7,
(SEQIDNO: 1566)
NQQKLSCKPADCLHGLV,;
CCDS33143.1, Ins, A_7,
(SEQIDNO: 1567)
NSRSWNIFRFASFSRHN,;
CCDS3946.1, Del, A_7,
(SEQIDNO: 1568)
PLKSFTILTVFYQTLKS,;
CCDS3457.1, Ins, A_7,
(SEQIDNO: 1569)
PSSHRDWRQHTFSFTFL,;
CCDS10967.1, Del, A_7,
(SEQIDNO: 1570)
QLFEKNRSLILKRKGLR,;
CCDS44334.1, Del, A_7,
(SEQIDNO: 1571)
QLIVVKIESIMFHWKKL,;
CCDS6143.1, Del, A_7,
(SEQIDNO: 1572)
QPLKTSSCLILYYQGLI,;
CCDS10841.1, Del, A_7,
(SEQIDNO: 1573)
QRKPKRANCVIQRRAKM,;
CCDS5044.1, Del, A_7,
(SEQIDNO: 1574)
QSLTSISATWLWLIWST,;
CCDS46445.1, Ins, A_7,
(SEQIDNO: 1575)
QSRIKNNCRISSHCDEK,;
CCDS3892.1, Ins, A_7,
(SEQIDNO: 1576)
RASDLVKRRYQRQHCEL,;
CCDS43145.1, Del, A_7,
(SEQIDNO: 1577)
REERGAMQEPHSLLREK,;
CCDS45998.1, Ins, A_7,
(SEQIDNO: 1578)
RGREEGGGGRRPWGRRP,;
CCDS41770.1, Del, A_7,
(SEQIDNO: 1579)
RMTSAVLLTVLIPCFPN,;
CCDS10363.1, Ins, A_7,
(SEQIDNO: 1580)
RPNHKTSICHSRKDLCK,;
CCDS58066.1, Ins, A_7,
(SEQIDNO: 1581)
RQRKGKTRKGTSIGRRE,;
CCDS31082.1, Del, A_7,
(SEQIDNO: 1582)
SKRHLKSLTMSRHQWM,;
CCDS34047.1, Del, A_7,
(SEQIDNO: 1583)
SSKTIKSLWIERTLRTS,;
CCDS34034.1, Del, A_7,
(SEQIDNO: 1584)
SVKDLSCSIQDKAFERS,;
CCDS32782.1, Ins, A_7,
(SEQIDNO: 1585)
TDGREREPLDRPHRLRA,;
CCDS34725.1, Ins, A_7,
(SEQIDNO: 1586)
TEAVGMQSNQRSRWATE,;
CCDS58275.1, Ins, A_7,
(SEQIDNO: 1588)
TRKLMPQPEPEKFRDGK,;
CCDS6253.2, Ins, A_7,
(SEQIDNO: 1589)
TTNTCIYETCIWLRRTL,;
CCDS2314.1, Del, A_7,
(SEQIDNO: 1590)
TTVFYTLFPVLYDFSMS,;
CCDS34146.2, Ins, A_7,
(SEQIDNO: 1591)
TWKCWACTSNQAGVCRV,;
CCDS42796.1, Del, A_7,
(SEQIDNO: 1592)
VIFFSKPKRIKNLSLKT,;
CCDS41499.1, Del, A_7,
(SEQIDNO: 1594)
WKTRLMYYKGSYLKQKK,;
CCDS54426.1, Del, A_7,
(SEQIDNO: 1595)
WLIIYKKCKILALTEKI,;
CCDS43553.1, Del, A_7,
(SEQIDNO: 1596)
WPWSSLMDRQILVIKRN,;
CCDS10734.1, Del, A_7,
(SEQIDNO: 1597)
YEHLVCQSRPIKSVSKR,;
CCDS2447.1, Ins, A_7,
(SEQIDNO: 1598)
YTNPNLPSVQCDGTQPE,;
CCDS54313.1, Del, A_7,
(SEQIDNO: 1599)
YTTLTVSGEMMKEIATK,;
CCDS14426.2, Del, A_7,
(SEQIDNO: 1600)
AKWSSKQHGSEPSRWV,;
CCDS42374.1, Del, A_7,
(SEQIDNO: 1601)
AQLFIIMQRCLKWWNV,;
CCDS1554.1, Del, A_7,
(SEQIDNO: 1602)
ARARSRRKVSTNLKRE,;
CCDS2146.1, Ins, A_7,
(SEQIDNO: 1603)
ASTEKINFTACCSYAP,;
CCDS5929.1, Del, A_7,
(SEQIDNO: 1604)
CISKLSMAQSKYQNLM,;
CCDS34109.2, Del, A_7,
(SEQIDNO: 1605)
CLEARAGMNSVKPKPF,;
CCDS14186.1, Del, A_7,
(SEQIDNO: 1606)
CSNCWKKCQMEFHLRK,;
CCDS48200.1, Del, A_7,
(SEQIDNO: 1607)
CTNVDIVTLRLQTHLF,;
CCDS55390.1, Del, A_7,
(SEQIDNO: 1608)
CTSVDIVTLRLQIHLF,;
CCDS41644.1, Del, A_7,
(SEQIDNO: 1609)
EGKTRQRRVRPKCHLW,;
CCDS5549.1, Del, A_7,
(SEQIDNO: 1610)
EKGNGLLQNFCLTNMM,;
CCDS3227.1, Del, A_7,
(SEQIDNO: 1611)
EKGRLYTLLVIQIPLE,;
CCDS13265.1, Del, A_7,
(SEQIDNO: 1612)
ELQQWQTIYKREVLDL,;
CCDS1807.1, Ins, A_7,
(SEQIDNO: 1613)
ERKTTRTERKKRGISF,;
CCDS3808.1, Del, A_7,
(SEQIDNO: 1614)
ETFVMTQGDFMSALLS,;
CCDS56405.1, Del, A_7,
(SEQIDNO: 1615)
FCQGKRSLNGKQEKLL,;
CCDS2259.1, Ins, A_7,
(SEQIDNO: 1616)
FCWTNFGVCSIVQLPL,;
CCDS7148.1, Del, A_7,
(SEQIDNO: 1617)
FIFFTTFMLVWLKRRN,;
CCDS31946.1, Ins, A_7,
(SEQIDNO: 1618)
FNGYYENKRVFPEVWI,;
CCDS47904.1, Del, A_7,
(SEQIDNO: 1619)
FQAVLQVFPGQIILAL,;
CCDS44410.1, Del, A_7,
(SEQIDNO: 1620)
FRLSHRAVFPVQSCLL,;
CCDS9344.1, Del, A_7,
(SEQIDNO: 1621)
FSMKQTLMNVKNLKTK,;
CCDS9755.1, Del, A_7,
(SEQIDNO: 1622)
FTELKLQKNLRTQVIV,;
CCDS34884.1, Del, A_7,
(SEQIDNO: 1623)
FYPIILEFTVIVAQEL,;
CCDS1937.1, Ins, A_7,
(SEQIDNO: 1624)
GDRQEEEEKKRGPRGL,;
CCDS7095.1, Del, A_7,
(SEQIDNO: 1625)
GENNLPIWNLRNFRKS,;
CCDS42127.1, Ins, A_7,
(SEQIDNO: 1626)
GGPGPHSLLGPGPLVL,;
CCDS5034.1, Del, A_7,
(SEQIDNO: 1627)
GKDRYCSNIDKHWLNS,;
CCDS12269.2, Del, A_7,
(SEQIDNO: 1628)
GKIRKLKMSTKIPGET,;
CCDS42505.1, Del, A_7,
(SEQIDNO: 1629)
GKTRALKIGTKIRGEF,;
CCDS58578.1, Ins, A_7,
(SEQIDNO: 1630)
GLTDPSGIFRISNKTT,;
CCDS35457.1, Del, A_7,
(SEQIDNO: 1631)
GRKKTWKAWEIKPSKL,;
CCDS45984.2, Del, A_7,
(SEQIDNO: 1632)
GTTSTLKMSTKILGET,;
CCDS8311.1, Ins, A_7,
(SEQIDNO: 1633)
ICSSSKLPTATSLHLV,;
CCDS47751.2, Del, A_7,
(SEQIDNO: 1634)
IGKTCWRPDCTSLAEN,;
CCDS45107.1, Del, A_7,
(SEQIDNO: 1635)
IGLTMLSGGKRRELGF,;
CCDS10654.1, Ins, A_7,
(SEQIDNO: 1637)
IPPSQWGPPPSAAAAG,;
CCDS12639.1, Del, A_7,
(SEQIDNO: 1638)
IQLQSRGFLMKNQLME,;
CCDS44954.1, Ins, A_7,
(SEQIDNO: 1639)
IQRSFGRYGHKQPSFY,;
CCDS34743.1, Ins, A_7,
(SEQIDNO: 1640)
ISKSSYRPFGPSTKEI,;
CCDS34101.1, Del, A_7,
(SEQIDNO: 1641)
ISSGIWPRRQTKTPLQ,;
CCDS44402.1, Del, A_7,
(SEQIDNO: 1642)
IYAQMFQNFKLCALQK,;
CCDS32133.1, Del, A_7,
(SEQIDNO: 1643)
KELNRGNYYPDCKSTQ,;
CCDS31027.1, Del, A_7,
(SEQIDNO: 1644)
KKILLIGILRSSQSQK,;
CCDS45045.1, Del, A_7,
(SEQIDNO: 1645)
KKMSWSLLLKRTFGMV,;
CCDS3920.1, Ins, A_7,
(SEQIDNO: 1646)
KKTRFLPTGGWGCYRR,;
CCDS53824.1, Ins, A_7,
(SEQIDNO: 1647)
KQNQYGCETRTILFEA,;
CCDS56056.1, Del, A_7,
(SEQIDNO: 1648)
KSCQKHWRRWPLNIMN,;
CCDS43426.1, Del, A_7,
(SEQIDNO: 1649)
KSYRLVLKELRNPLKV,;
CCDS3738.1, Ins, A_7,
(SEQIDNO: 1650)
KTSASPSEIEGISVCP,;
CCDS34506.1, Del, A_7,
(SEQIDNO: 1651)
LDPKVPVLMYWELLLI,;
CCDS6953.1, Del, A_7,
(SEQIDNO: 1652)
LKAVESPIFGVLSFSS,;
CCDS12414.2, Del, A_7,
(SEQIDNO: 1653)
LLNIKNLANHFAYFQT,;
CCDS58923.1, Del, A_7,
(SEQIDNO: 1654)
LNCGRPRKLLSIWGTT,;
CCDS2644.1, Del, A_7,
(SEQIDNO: 1655)
LPIMPCWSPCLAGSLW,;
CCDS5228.1, Del, A_7,
(SEQIDNO: 1656)
LPSSRFLQLSRQVTTT,;
CCDS55255.1, Del, A_7,
(SEQIDNO: 1657)
LRLKTKQNQLPLILRR,;
CCDS5382.1, Del, A_7,
(SEQIDNO: 1658)
LSKTQTLKSRYLHCRN,;
CCDS31066.1, Del, A_7,
(SEQIDNO: 1659)
LTSRLRRTGRITWVRL,;
CCDS13715.1, Del, A_7,
(SEQIDNO: 1660)
MACLKKKTRMLDLKTT,;
CCDS9543.1, Del, A_7,
(SEQIDNO: 1661)
MPRLEASKMIQNIRSF,;
CCDS2194.1, Del, A_7,
(SEQIDNO: 1662)
NDVRKKKNLFRRVHCI,;
CCDS9311.1, Ins, A_7,
(SEQIDNO: 1663)
NERNAPKWSQSICWTI,;
CCDS4518.1, Ins, A_7,
(SEQIDNO: 1664)
NESDYFSSCISSCFYV,;
CCDS33641.1, Ins, A_7,
(SEQIDNO: 1665)
NETSLCEHRDTDPSGA,;
CCDS10142.1, Ins, A_7,
(SEQIDNO: 1666)
NISSRKQARSEQLFFC,;
CCDS4278.1, Ins, A_7,
(SEQIDNO: 1667)
NKRNSAGHYRSLTRNL,;
CCDS46851.1, Ins, A_7,
(SEQIDNO: 1668)
NKTATGPHRREGDTGR,;
CCDS53353.1, Ins, A_7,
(SEQIDNO: 1669)
NPESVEASWQRSTLHP,;
CCDS3467.1, Ins, A_7,
(SEQIDNO: 1670)
NPHSRLFSRAQTPMAI,;
CCDS7480.1, Ins, A_7,
(SEQIDNO: 1671)
NQARNLCNGRHSRTCQ,;
CCDS10265.1, Ins, A_7,
(SEQIDNO: 1672)
NQGEGQRKQVPVCLDV,;
CCDS1377.1, Ins, A_7,
(SEQIDNO: 1673)
NQITPKAVLKSKENIY,;
CCDS9014.2, Ins, A_7,
(SEQIDNO: 1674)
NRRWCKNIYYLSLPFA,;
CCDS2261.1, Ins, A_7,
(SEQIDNO: 1675)
NSHSFRKDLAPRPCSL,;
CCDS899.1, Ins, A_7,
(SEQIDNO: 1676)
NSRTSVWYSDLERPLH,;
CCDS45279.1, Ins, A_7,
(SEQIDNO: 1677)
NSSWKFFIWPGGPYDG,;
CCDS55317.1, Ins, A_7,
(SEQIDNO: 1678)
NVCTPFYSYNQPKFSQ,;
CCDS3952.1, Ins, A_7,
(SEQIDNO: 1679)
NVFHSTRCCWCHYKIQ,;
CCDS7273.1, Ins, A_7,
(SEQIDNO: 1680)
NYSSNWSWGVCFMWNT,;
CCDS695.1, Ins, A_7,
(SEQIDNO: 1681)
NYSTVHRKRFHRPDCY,;
CCDS5944.1, Ins, A_7,
(SEQIDNO: 1682)
NYTVPQTRRLRKRICS,;
CCDS8253.1, Del, A_7,
(SEQIDNO: 1683)
PKQTCLKGGQQEQGNV,;
CCDS58957.1, Del, A_7,
(SEQIDNO: 1684)
PSRPRHCLLQAGFQTC,;
CCDS31347.1, Ins, A_7,
(SEQIDNO: 1687)
QPCGGCIQLPHRQKDQ,;
CCDS14435.1, Del, A_7,
(SEQIDNO: 1688)
QSLKSIKKSKAETEER,;
CCDS54969.1, Del, A_7,
(SEQIDNO: 1689)
QSTPSWITWMNRKEWN,;
CCDS46299.1, Del, A_7,
(SEQIDNO: 1690)
QVYLLLLNLDTHIVEI,;
CCDS1240.1, Ins, A_7,
(SEQIDNO: 1691)
RECNLFSARNAPRHEF,;
CCDS34521.1, Del, A_7,
(SEQIDNO: 1692)
RKKKRKKMKKKTILTT,;
CCDS45650.1, Ins, A_7,
(SEQIDNO: 1693)
RNRKLHRKIAYIPLLL,;
CCDS53822.1, Ins, A_7,
(SEQIDNO: 1694)
RRKDFGIVANLLSKVS,;
CCDS34204.1, Ins, A_7,
(SEQIDNO: 1695)
RSSFWCGKFKEEKSKS,;
CCDS42415.1, Del, A_7,
(SEQIDNO: 1696)
RSWSSPKSSSSSWWSR,;
CCDS8336.2, Ins, A_7,
(SEQIDNO: 1697)
RTSTGYKVYICWQSRA,;
CCDS2382.1, Del, A_7,
(SEQIDNO: 1698)
SAITAVEWSFRITATG,;
CCDS4993.1, Del, A_7,
(SEQIDNO: 1699)
SCFQRRKRRIYQHLRY,;
CCDS30744.1, Ins, A_7,
(SEQIDNO: 1700)
SFEEKQWGTKWILCGN,;
CCDS43930.1, Ins, A_7,
(SEQIDNO: 1701)
SHQCAADRNGREQRAR,;
CCDS31878.1, Del, A_7,
(SEQIDNO: 1702)
SQLLSKKYQQTQRILL,;
CCDS56590.1, Del, A_7,
(SEQIDNO: 1703)
SRNHQRPAARNLTSEE,;
CCDS9344.1, Ins, A_7,
(SEQIDNO: 1704)
SRRNYFNFKNNCQSRL,;
CCDS13029.2, Del, A_7,
(SEQIDNO: 1705)
SSLPPCGASPGPWRRS,;
CCDS12436.1, Del, A_7,
(SEQIDNO: 1706)
TAAVAAAYLAWATHLK,;
CCDS43523.1, Del, A_7,
(SEQIDNO: 1707)
TAVTLMVTSMVPGATQ,;
CCDS34287.1, Ins, A_7,
(SEQIDNO: 1708)
TCEDRCCEIHAKKPHE,;
CCDS1389.1, Ins, A_7,
(SEQIDNO: 1709)
TDSGTAPGCHYYSEAL,;
CCDS43230.1, Ins, A_7,
(SEQIDNO: 1710)
TEGVKEAQAPCPGSTT,;
CCDS9201.1, Ins, A_7,
(SEQIDNO: 1711)
TETEAPVQHLSRPHQV,;
CCDS41499.1, Ins, A_7,
(SEQIDNO: 1712)
TIYVRGFTGGYVTLSY,;
CCDS11684.1, Del, A_7,
(SEQIDNO: 1713)
TMKWWELYLVILSHIA,;
CCDS54105.1, Ins, A_7,
(SEQIDNO: 1714)
TTSSLLHSDCHQHSPG,;
CCDS6195.1, Ins, A_7,
(SEQIDNO: 1715)
TVSCYGPEDSCQENIW,;
CCDS5944.1, Ins, A_7,
(SEQIDNO: 1716)
VHRNQPPHPVLIQHQH,;
CCDS4955.1, Del, A_7,
(SEQIDNO: 1717)
VLHPGHFPLQVWLLTE,;
CCDS11374.1, Del, A_7,
(SEQIDNO: 1718)
VMRRKWKSCNIQLGGT,;
CCDS5232.1, Ins, A_7,
(SEQIDNO: 1719)
VRYQHAVSIKCCSLPR,;
CCDS32800.1, Del, A_7,
(SEQIDNO: 1720)
VTIRIQKQKFRILKRI,;
CCDS34743.1, Del, A_7,
(SEQIDNO: 1722)
WSRTVGQCPALDEMHC,;
CCDS44737.1, Ins, A_7,
(SEQIDNO: 1723)
YCHCYFPGPAFQTLSH,;
CCDS59217.1, Del, A_7,
(SEQIDNO: 1724)
YIKMLIGRSGRYIKKR,;
CCDS4348.1, Del, A_7,
(SEQIDNO: 1727)
CRMKRNRKEEKRALD,;
CCDS9899.1, Del, A_7,
(SEQIDNO: 1728)
EFINLKMIKWTLLKS,;
CCDS10168.2, Del, A_7,
(SEQIDNO: 1729)
EIKTTEGKRSCLLKR,;
CCDS11995.1, Del, A_7,
(SEQIDNO: 1730)
ENLKGESLCQNKEVK,;
CCDS12436.1, Ins, A_7,
(SEQIDNO: 1731)
EQRQWRRLIWHGPHT,;
CCDS9493.1, Ins, A_7,
(SEQIDNO: 1732)
ERRVQGRNRTICEQT,;
CCDS58395.1, Ins, A_7,
(SEQIDNO: 1733)
ESLFHVQEESGTYWV,;
CCDS2557.1, Del, A_7,
(SEQIDNO: 1734)
EWLILKGLEENLLGI,;
CCDS54424.1, Del, A_7,
(SEQIDNO: 1735)
FLQKSLRWKNLSQPK,;
CCDS44689.1, Del, A_7,
(SEQIDNO: 1736)
FRVLNLETLAIYLLQ,;
CCDS45663.1, Ins, A_7,
(SEQIDNO: 1737)
GEEEKEGEEKEAQET,;
CCDS41715.1, Del, A_7,
(SEQIDNO: 1738)
GHTKNRRKAKRKPQI,;
CCDS32600.1, Del, A_7,
(SEQIDNO: 1739)
GKLGAIVPRVVKTLI,;
CCDS35215.2, Del, A_7,
(SEQIDNO: 1740)
GKRRKILRTGRKLSV,;
CCDS56440.1, Del, A_7,
(SEQIDNO: 1741)
GLLLANGSLLLLSLS,;
CCDS8300.1, Del, A_7,
(SEQIDNO: 1742)
GLPQCGDSFLKRPLT,;
CCDS7128.1, Del, A_7,
(SEQIDNO: 1743)
GMRLGSGTGMFTSAN,;
CCDS42035.1, Del, A_7,
(SEQIDNO: 1746)
HLTLARMKHFIYFKH,;
CCDS5447.1, Del, A_7,
(SEQIDNO: 1747)
HPSPRLLLQSDSSHL,;
CCDS54379.1, Del, A_7,
(SEQIDNO: 1748)
KEEMLKRCTKKLGKS,;
CCDS1167.1, Ins, A_7,
(SEQIDNO: 1749)
KEPEISDTCTESPCV,;
CCDS8530.1, Ins, A_7,
(SEQIDNO: 1750)
KIPRFQGPHDGAENL,;
CCDS1332.1, Del, A_7,
(SEQIDNO: 1751)
KKSHNRRFARSLIWW,;
CCDS33793.1, Ins, A_7,
(SEQIDNO: 1752)
KKSLQSTVLLVLSML,;
CCDS59374.1, Ins, A_7,
(SEQIDNO: 1753)
KQAQINDLSTSYTVL,;
CCDS46430.1, Del, A_7,
(SEQIDNO: 1754)
KRNKQSSCEREIGKP,;
CCDS33893.1, Ins, A_7,
(SEQIDNO: 1755)
KRVVFCPSEGDRHRL,;
CCDS47852.1, Ins, A_7,
(SEQIDNO: 1756)
KTCRAEDGSGFATHP,;
CCDS55858.1, Del, A_7,
(SEQIDNO: 1757)
KTIIINFKCRSLQIF,;
CCDS9436.1, Ins, A_7,
(SEQIDNO: 1758)
LCCCPRNFYRRTKIR,;
CCDS44279.1, Ins, A_7,
(SEQIDNO: 1759)
LCRPGFQWRLYSLWK,;
CCDS3505.1, Del, A_7,
(SEQIDNO: 1760)
LEYCQTTLKAKELFL,;
CCDS33351.2, Del, A_7,
(SEQIDNO: 1761)
LFKNTLRRKKISEEG,;
CCDS7103.1, Del, A_7,
(SEQIDNO: 1762)
LLEKQLELLDLMFCD,;
CCDS34195.1, Ins, A_7,
(SEQIDNO: 1763)
LLTPGGELPHGILGQ,;
CCDS2847.1, Del, A_7,
(SEQIDNO: 1764)
LMRKRMTTPIEFLKL,;
CCDS44611.1, Del, A_7,
(SEQIDNO: 1765)
LNRMKVPLMKLITRV,;
CCDS11681.1, Del, A_7,
(SEQIDNO: 1766)
LPQEMSLFVLKKVKL,;
CCDS6947.1, Del, A_7,
(SEQIDNO: 1767)
LSLNSKKNVKTRRIL,;
CCDS10176.1, Del, A_7,
(SEQIDNO: 1768)
LSNEYIKNLIQLERF,;
CCDS58709.1, Del, A_7,
(SEQIDNO: 1769)
LTFPQKTFIRTSTGC,;
CCDS6518.1, Ins, A_7,
(SEQIDNO: 1770)
LYLDSSRYQERCYYT,;
CCDS3087.1, Ins, A_7,
(SEQIDNO: 1773)
MHRHHKTMHKEKIRE,;
CCDS2290.1, Del, A_7,
(SEQIDNO: 1774)
MKVLYPKQWSTCLAG,;
CCDS8342.1, Ins, A_7,
(SEQIDNO: 1776)
NDQSCRSKKSNEEKF,;
CCDS35409.1, Ins, A_7,
(SEQIDNO: 1777)
NEISIFRKHKDNKNG,;
CCDS41765.1, Ins, A_7,
(SEQIDNO: 1778)
NFKFGKRVGCLSEGS,;
CCDS53846.1, Ins, A_7,
(SEQIDNO: 1779)
NFQIKQNPVSGRLQN,;
CCDS5776.1, Ins, A_7,
(SEQIDNO: 1780)
NFSHPKCQCIRKPSR,;
CCDS47155.1, Ins, A_7,
(SEQIDNO: 1781)
NGGTGEGLWPLLGGQ,;
CCDS34680.1, Del, A_7,
(SEQIDNO: 1782)
NILLIWASHMDQLFK,;
CCDS41619.1, Ins, A_7,
(SEQIDNO: 1783)
NMEESWHCLFGLSYL,;
CCDS56400.1, Ins, A_7,
(SEQIDNO: 1784)
NPVLDSWRGVFVRYQ,;
CCDS2234.1, Ins, A_7,
(SEQIDNO: 1785)
NQSSKRCFRRQTPRT,;
CCDS41887.1, Ins, A_7,
(SEQIDNO: 1786)
NSCISTKVAAVEGRD,;
CCDS13665.1, Ins, A_7,
(SEQIDNO: 1787)
NTELGKTTEVELQSL,;
CCDS41961.1, Ins, A_7,
(SEQIDNO: 1788)
NTPCKDQQTKNQRER,;
CCDS33310.1, Ins, A_7,
(SEQIDNO: 1789)
NYQGDDESVRYRQFS,;
CCDS13697.1, Ins, A_7,
(SEQIDNO: 1790)
PGKERARIRAAENGL,;
CCDS2130.1, Del, A_7,
(SEQIDNO: 1791)
PKDKSCLIRLCTTWT,;
CCDS3198.1, Del, A_7,
(SEQIDNO: 1792)
PRFWWVLIKMKGQLF,;
CCDS1508.1, Ins, A_7,
(SEQIDNO: 1793)
PSCCSEKSEEADPEG,;
CCDS47630.1, Del, A_7,
(SEQIDNO: 1795)
QVCILTKSQNWKWKA,;
CCDS43313.1, Ins, A_7,
(SEQIDNO: 1796)
RKEEALRMPGLQQCV,;
CCDS4844.1, Ins, A_7,
(SEQIDNO: 1797)
RKEESSGGSPLGWHG,;
CCDS11494.1, Del, A_7,
(SEQIDNO: 1798)
RKKKAVRQIQPRISL,;
CCDS32234.1, Ins, A_7,
(SEQIDNO: 1799)
RKREGNCKTKTTHST,;
CCDS46338.1, Del, A_7,
(SEQIDNO: 1800)
RMRIWMRLKPTFQSL,;
CCDS9201.1, Del, A_7,
(SEQIDNO: 1801)
RNRSSCSAPQSSTPS,;
CCDS5549.1, Ins, A_7,
(SEQIDNO: 1802)
RRKEMGSSKISASQI,;
CCDS43242.1, Del, A_7,
(SEQIDNO: 1803)
RWLGSWKFCDLRNAV,;
CCDS3882.1, Del, A_7,
(SEQIDNO: 1805)
SCRKLIRLSWSYSIH,;
CCDS31874.1, Ins, A_7,
(SEQIDNO: 1806)
SDLDRKLAEKRTRLY,;
CCDS56144.1, Ins, A_7,
(SEQIDNO: 1807)
SGTINDWSKRREINN,;
CCDS1917.1, Ins, A_7,
(SEQIDNO: 1808)
SIRRCSTTIWAWDRI,;
CCDS645.1, Del, A_7,
(SEQIDNO: 1809)
SISLTKASILKDQWK,;
CCDS6766.1, Del, A_7,
(SEQIDNO: 1810)
SNTCFRSLHCAGLSL,;
CCDS54856.1, Ins, A_7,
(SEQIDNO: 1811)
SREKRSCLRVGPTSC,;
CCDS14399.1, Del, A_7,
(SEQIDNO: 1812)
SRFQLTRSQMLSCIH,;
CCDS33506.1, Del, A_7,
(SEQIDNO: 1813)
SRPLRDFTSRARPRR,;
CCDS3228.1, Del, A_7,
(SEQIDNO: 1814)
SRRLPRRWQTKFHVQ,;
CCDS35201.1, Ins, A_7,
(SEQIDNO: 1816)
TAGDQNGRDGGGGQW,;
CCDS2707.1, Ins, A_7,
(SEQIDNO: 1817)
TGAEGIWIPFSARGP,;
CCDS5734.1, Del, A_7,
(SEQIDNO: 1818)
TKRQAIISLGQNHFH,;
CCDS33205.1, Del, A_7,
(SEQIDNO: 1819)
TLLASLSRRHLTQLV,;
CCDS2135.1, Ins, A_7,
(SEQIDNO: 1820)
TRTTYSWSSLCAPPT,;
CCDS46919.1, Ins, A_7,
(SEQIDNO: 1821)
TVHISVIISESSRTY,;
CCDS42366.1, Del, A_7,
(SEQIDNO: 1822)
VLLENLVYRNFGSGA,;
CCDS44942.1, Del, A_7,
(SEQIDNO: 1823)
VLSLARVSPVNTELN,;
CCDS47218.1, Del, A_7,
(SEQIDNO: 1824)
VLYRMMLLQCQGKHL,;
CCDS47445.1, Del, A_7,
(SEQIDNO: 1825)
VRKQLTTVNCSASTV,;
CCDS47573.1, Ins, A_7,
(SEQIDNO: 1826)
VSFTKTVFLHLLQKM,;
CCDS6049.1, Ins, A_7,
(SEQIDNO: 1827)
WKSHTILQCGQLCRN,;
CCDS31071.1, Ins, A_7,
(SEQIDNO: 1828)
WNSYSYGQKLSFQDT,;
CCDS4072.1, Ins, A_7,
(SEQIDNO: 1829)
YCTKDHSEGSSPFSR,;
CCDS3096.1, Del, A_7,
(SEQIDNO: 1830)
YFGMNLKMSPSRTLH,;
CCDS54820.1, Del, A_7,
(SEQIDNO: 1832)
YGPQPVAMQHFRTRD,;
CCDS33332.1, Del, A_7,
(SEQIDNO: 1833)
YLKKSWKKKLTRRLN,;
CCDS3200.1, Ins, A_7,
(SEQIDNO: 1834)
YRICSGSLSRGFLIS,;
CCDS14501.1, Del, A_7,
(SEQIDNO: 1835)
YSVPKLFQYLWVSLT,;
CCDS9508.1, Ins, A_7,
(SEQIDNO: 1837)
AESCPKDEESYWNY,;
CCDS5011.1, Ins, A_7,
(SEQIDNO: 1838)
AFSASIPNAEDHGI,;
CCDS46809.1, Ins, A_7,
(SEQIDNO: 1839)
CGGVPEVPRVDDTL,;
CCDS1842.1, Del, A_7,
(SEQIDNO: 1840)
CHQEKHLSISWRPR,;
CCDS9416.2, Del, A_7,
(SEQIDNO: 1841)
CLCLVNHTKIQQKL,;
CCDS34913.1, Del, A_7,
(SEQIDNO: 1842)
CLINTCFPWPWRKM,;
CCDS3127.1, Del, A_7,
(SEQIDNO: 1843)
CLQLQNSLSPPHSL,;
CCDS46348.1, Del, A_7,
(SEQIDNO: 1844)
CSLLILICDQLFLK,;
CCDS3973.2, Del, A_7,
(SEQIDNO: 1845)
DITITLELRTIWIV,;
CCDS43655.2, Del, A_7,
(SEQIDNO: 1846)
DLKRMMMRNQENVS,;
CCDS42791.1, Ins, A_7,
(SEQIDNO: 1847)
EGEDYRRQNFRFEE,;
CCDS8438.1, Del, A_7,
(SEQIDNO: 1848)
EGNLIQNRSPTPSE,;
CCDS54659.1, Del, A_7,
(SEQIDNO: 1849)
EKEYGRKTLKKKVT,;
CCDS10517.1, Ins, A_7,
(SEQIDNO: 1850)
ELWGPRKGEPNENG,;
CCDS43658.1, Del, A_7,
(SEQIDNO: 1851)
EWQQPNNVLGRSLS,;
CCDS11625.1, Ins, A_7,
(SEQIDNO: 1852)
FEDVNSWPNESPRN,;
CCDS3591.1, Del, A_7,
(SEQIDNO: 1853)
FLLVAFLQIHLKRK,;
CCDS34494.2, Del, A_7,
(SEQIDNO: 1854)
FRIWSDKLRKWKGF,;
CCDS44337.1, Ins, A_7,
(SEQIDNO: 1855)
FRTFYKQRRQSGTK,;
CCDS43758.1, Del, A_7,
(SEQIDNO: 1856)
FYKTSNLEIPFMML,;
CCDS13900.2, Del, A_7,
(SEQIDNO: 1857)
GASPATCLPCRGSS,;
CCDS47037.1, Del, A_7,
(SEQIDNO: 1858)
GGRMRNIFTPAGHK,;
CCDS9372.1, Del, A_7,
(SEQIDNO: 1859)
GKIYSQGKDLIFLT,;
CCDS6243.1, Del, A_7,
(SEQIDNO: 1860)
GKRKKATRIQVLSV,;
CCDS41958.1, Ins, A_7,
(SEQIDNO: 1861)
GKRMYGWNFRVRGG,;
CCDS31735.1, Ins, A_7,
(SEQIDNO: 1862)
GLETSLSWRSNALP,;
CCDS6839.1, Del, A_7,
(SEQIDNO: 1863)
GLLHILEQHGNLED,;
CCDS2955.1, Ins, A_7,
(SEQIDNO: 1864)
GNSSFKPRKTGAVQ,;
CCDS5046.1, Ins, A_7,
(SEQIDNO: 1865)
GWRRFRSFRRTYVL,;
CCDS30975.1, Ins, A_7,
(SEQIDNO: 1866)
HLRGPCLQSRGDRI,;
CCDS41766.2, Del, A_7,
(SEQIDNO: 1867)
HNYRRLNLSKSQSL,;
CCDS47539.1, Ins, A_7,
(SEQIDNO: 1869)
ILPQISIQQPSENS,;
CCDS58039.1, Ins, A_7,
(SEQIDNO: 1870)
IQEHCSTKRIRGHQ,;
CCDS34158.1, Del, A_7,
(SEQIDNO: 1871)
IRNTSQFRLEHMLI,;
CCDS2749.2, Del, A_7,
(SEQIDNO: 1872)
ISKIEGLLKKGGRK,;
CCDS11423.1, Del, A_7,
(SEQIDNO: 1873)
ISSLIGMMGPFWGL,;
CCDS43341.1, Ins, A_7,
(SEQIDNO: 1874)
ITEIVFQKYQIYKK,;
CCDS3593.1, Ins, A_7,
(SEQIDNO: 1875)
IVRKQIPSNWFWEV,;
CCDS47859.1, Del, A_7,
(SEQIDNO: 1876)
KASSPATMWPNSTP,;
CCDS7585.1, Ins, A_7,
(SEQIDNO: 1877)
KEFTLCCRLLQSQD,;
CCDS7258.1, Ins, A_7,
(SEQIDNO: 1878)
KETPQTVPGSEEKV,;
CCDS47063.1, Ins, A_7,
(SEQIDNO: 1879)
KFFNIVFRNSKTKK,;
CCDS5034.1, Ins, A_7,
(SEQIDNO: 1880)
KGKTDTVPTSTSTG,;
CCDS4224.1, Ins, A_7,
(SEQIDNO: 1881)
KGQCGDNSQHQSEK,;
CCDS46392.1, Del, A_7,
(SEQIDNO: 1882)
KILKLVTRMANRRK,;
CCDS11270.1, Ins, A_7,
(SEQIDNO: 1883)
KKGCKLSNKASSHR,;
CCDS6286.1, Ins, A_7,
(SEQIDNO: 1884)
KKNFNRLPVSEEKR,;
CCDS3356.1, Ins, A_7,
(SEQIDNO: 1885)
KKPHKEDTGPYRRC,;
CCDS8740.1, Del, A_7,
(SEQIDNO: 1886)
KKRKLLNQKKKLRK,;
CCDS987.1, Ins, A_7,
(SEQIDNO: 1887)
KKSRGPPSQLHSRG,;
CCDS1518.1, Ins, A_7,
(SEQIDNO: 1888)
KKVENNQTRTKNPR,;
CCDS7775.1, Ins, A_7,
(SEQIDNO: 1889)
KMDNGERNTKEDYF,;
CCDS4835.1, Ins, A_7,
(SEQIDNO: 1890)
KSCRACPEPQLHVR,;
CCDS46430.1, Ins, A_7,
(SEQIDNO: 1891)
KTAIRVSFCFRTFF,;
CCDS660.1, Ins, A_7,
(SEQIDNO: 1892)
KTNKITVTRKPGDW,;
CCDS1533.1, Ins, A_7,
(SEQIDNO: 1893)
KVYQHQVFCFHGDG,;
CCDS4955.1, Ins, A_7,
(SEQIDNO: 1894)
LCCILGIFHCKCGC,;
CCDS58101.1, Del, A_7,
(SEQIDNO: 1895)
LHQRTASGRSGPSW,;
CCDS31757.1, Del, A_7,
(SEQIDNO: 1896)
LIKPDSWKTVCLTG,;
CCDS33770.2, Del, A_7,
(SEQIDNO: 1897)
LKWFHLSQLKINLS,;
CCDS8652.1, Del, A_7,
(SEQIDNO: 1898)
LLGPLTQIHQILLS,;
CCDS31976.1, Del, A_7,
(SEQIDNO: 1899)
LLPILWVCTFSRPA,;
CCDS30956.1, Ins, A_7,
(SEQIDNO: 1901)
LQCQHLGPPKYWWF,;
CCDS46928.1, Del, A_7,
(SEQIDNO: 1902)
LQISLPMKDHHLFL,;
CCDS42794.1, Del, A_7,
(SEQIDNO: 1903)
LRISGAQLRDFLVT,;
CCDS55971.1, Del, A_7,
(SEQIDNO: 1904)
LVLSTKKIMTAKDL,;
CCDS6872.1, Del, A_7,
(SEQIDNO: 1905)
LVMTLPRQRVTGRA,;
CCDS34146.2, Del, A_7,
(SEQIDNO: 1906)
MEVLGLHLKPSRCV,;
CCDS34042.1, Del, A_7,
(SEQIDNO: 1907)
MSMRHRKKCLKWSN,;
CCDS7799.2, Ins, A_7,
(SEQIDNO: 1908)
NADCFTRTCYKSNC,;
CCDS33716.1, Ins, A_7,
(SEQIDNO: 1909)
NCSPKKNAQICQFQ,;
CCDS1121.1, Ins, A_7,
(SEQIDNO: 1910)
NDTQAWASYPRRQM,;
CCDS8342.1, Ins, A_7,
(SEQIDNO: 1911)
NIERFARSSVPFGD,;
CCDS3505.1, Ins, A_7,
(SEQIDNO: 1912)
NIRNRRMGGVFRIL,;
CCDS58490.1, Ins, A_7,
(SEQIDNO: 1913)
NIVGSNTTTENGIV,;
CCDS2222.1, Ins, A_7,
(SEQIDNO: 1914)
NLLFSKKIWFIFFY,;
CCDS34333.1, Del, A_7,
(SEQIDNO: 1915)
NMVFEKEENIYITL,;
CCDS7123.1, Ins, A_7,
(SEQIDNO: 1917)
NPEGCSDHLQEGRR,;
CCDS53528.1, Ins, A_7,
(SEQIDNO: 1918)
NQAVRAKCWEPVWG,;
CCDS9492.1, Ins, A_7,
(SEQIDNO: 1919)
NQLYHPLFNKFGDF,;
CCDS7383.1, Ins, A_7,
(SEQIDNO: 1920)
NSAFIQSTFFISEG,;
CCDS4562.1, Ins, A_7,
(SEQIDNO: 1921)
NSHYSPPPAASDPQ,;
CCDS1628.1, Ins, A_7,
(SEQIDNO: 1922)
NSWKKKSKKQKRDC,;
CCDS43426.1, Ins, A_7,
(SEQIDNO: 1923)
NTKIPTEKSSSGKT,;
CCDS45057.1, Ins, A_7,
(SEQIDNO: 1924)
NVSRQPAASYLHNK,;
CCDS2664.1, Ins, A_7,
(SEQIDNO: 1925)
NWGPRETERIHCLP,;
CCDS33264.1, Del, A_7,
(SEQIDNO: 1926)
PIKKNPSMKSFIFV,;
CCDS6597.1, Ins, A_7,
(SEQIDNO: 1927)
PKVHTQTTGLPDDF,;
CCDS45984.2, Del, A_7,
(SEQIDNO: 1928)
PMNVSSVGKHYLIL,;
CCDS34290.1, Del, A_7,
(SEQIDNO: 1929)
PSSGHANLWWMVWR,;
CCDS41302.1, Del, A_7,
(SEQIDNO: 1930)
PWKNSESMKKVKCI,;
CCDS43729.1, Del, A_7,
(SEQIDNO: 1931)
QENPLPTNTSKLTK,;
CCDS2251.1, Ins, A_7,
(SEQIDNO: 1932)
REINHSKQLPQKFC,;
CCDS41470.1, Del, A_7,
(SEQIDNO: 1933)
RKFWMTQLKIFVLC,;
CCDS58996.1, Ins, A_7,
(SEQIDNO: 1934)
RKRSHSQYHLSPPG,;
CCDS5611.1, Del, A_7,
(SEQIDNO: 1936)
SCLFQSPSPTLQMN,;
CCDS8336.2, Ins, A_7,
(SEQIDNO: 1937)
SKERKEKKEQETEI,;
CCDS4966.1, Ins, A_7,
(SEQIDNO: 1938)
SKSCCRSSSQTFRQ,;
CCDS45399.1, Del, A_7,
(SEQIDNO: 1939)
SLNQRSYARPSCQP,;
CCDS41630.1, Ins, A_7,
(SEQIDNO: 1940)
SSLRLDKVQSHMSI,;
CCDS9244.1, Del, A_7,
(SEQIDNO: 1941)
SYLKNCGSQVKRST,;
CCDS56533.1, Del, A_7,
(SEQIDNO: 1942)
SYMCWRRSSILNKK,;
CCDS13571.1, Ins, A_7,
(SEQIDNO: 1943)
TGSSRHHPKDCWRK,;
CCDS9697.1, Del, A_7,
(SEQIDNO: 1944)
TGWQPLFLFIIVVL,;
CCDS41292.1, Ins, A_7,
(SEQIDNO: 1945)
TIKEGRKTYNCRGG,;
CCDS14501.1, Ins, A_7,
(SEQIDNO: 1946)
TIQCQSSFNICGSL,;
CCDS54838.1, Ins, A_7,
(SEQIDNO: 1948)
TQSSTTSYQSYPVE,;
CCDS11194.1, Del, A_7,
(SEQIDNO: 1949)
TRPRGSPTCCQTVA,;
CCDS34478.1, Del, A_7,
(SEQIDNO: 1950)
TRQFRGWISMISHH,;
CCDS4098.1, Ins, A_7,
(SEQIDNO: 1951)
TRRLFGARESWETW,;
CCDS5510.1, Del, A_7,
(SEQIDNO: 1952)
TTNLSVHQGLHMVV,;
CCDS35118.1, Ins, A_7,
(SEQIDNO: 1953)
VGTNQKGFSSSRRK,;
CCDS47885.1, Ins, A_7,
(SEQIDNO: 1954)
VKKQYPVERCRCWL,;
CCDS6343.1, Del, A_7,
(SEQIDNO: 1955)
VKTTTYFSWKICMQ,;
CCDS4973.1, Del, A_7,
(SEQIDNO: 1956)
VPALKKLRSPLWIF,;
CCDS10171.1, Del, A_7,
(SEQIDNO: 1957)
VQKHSGKFRISLSF,;
CCDS8019.1, Del, A_7,
(SEQIDNO: 1958)
WEPWVLLPWTAKGM,;
CCDS54564.1, Del, A_7,
(SEQIDNO: 1959)
WKKLSRKQRRCKKR,;
CCDS42686.1, Del, A_7,
(SEQIDNO: 1960)
WLILMVKNLDVKRS,;
CCDS33167.1, Ins, A_7,
(SEQIDNO: 1961)
YAPFKRWIENDFDL,;
CCDS14186.1, Ins, A_7,
(SEQIDNO: 1962)
YARIAGRNAKWSST,;
CCDS14782.1, Ins, A_7,
(SEQIDNO: 1963)
YEYYKGFVGSSCRS,;
CCDS34086.1, Ins, A_7,
(SEQIDNO: 1964)
YHQRPGRGIHKDSG,;
CCDS34209.1, Ins, A_7,
(SEQIDNO: 1965)
YNKAECGAKVPCGL,;
CCDS5611.1, Ins, A_7,
(SEQIDNO: 1966)
APVYFRAHPPPFK,;
CCDS4959.1, Del, A_7,
(SEQIDNO: 1967)
AQPKTVPSNQILR,;
CCDS32710.1, Ins, A_7,
(SEQIDNO: 1968)
ASQCCSRNGTGKV,;
CCDS47973.1, Del, A_7,
(SEQIDNO: 1969)
ASQHQSLLRAKKQ,;
CCDS41655.1, Ins, A_7,
(SEQIDNO: 1970)
CESVTTGTAQTGH,;
CCDS43349.1, Del, A_7,
(SEQIDNO: 1971)
CFMLEKTENKIVW,;
CCDS31064.1, Del, A_7,
(SEQIDNO: 1972)
CKRETIFVITRLI,;
CCDS7434.1, Del, A_7,
(SEQIDNO: 1973)
CTASTRIQRCLSS,;
CCDS41485.1, Ins, A_7,
(SEQIDNO: 1974)
CTCTNTDRRCKYC,;
CCDS2620.2, Ins, A_7,
(SEQIDNO: 1975)
DEKIKRRWNRRRK,;
CCDS58308.1, Del, A_7,
(SEQIDNO: 1976)
DLLISIQMLPLLF,;
CCDS2010.1, Del, A_7,
(SEQIDNO: 1977)
EEAKELKRRKERI,;
CCDS5230.1, Del, A_7,
(SEQIDNO: 1978)
EKVSLPGHHSKRW,;
CCDS33493.1, Del, A_7,
(SEQIDNO: 1979)
EMLPPTKTVHSIP,;
CCDS3707.1, Del, A_7,
(SEQIDNO: 1980)
EQKTEWEWKLQIE,;
CCDS33924.1, Del, A_7,
(SEQIDNO: 1981)
FLKWLRLWLMVQT,;
CCDS47457.1, Del, A_7,
(SEQIDNO: 1982)
GKLKKLNQHQQLS,;
CCDS9344.1, Del, A_7,
(SEQIDNO: 1983)
GLEKEYLMVNQKE,;
CCDS7259.1, Del, A_7,
(SEQIDNO: 1984)
GLPETEKMPQLMP,;
CCDS47466.2, Del, A_7,
(SEQIDNO: 1985)
GNSKMKPGNILPL,;
CCDS34101.1, Del, A_7,
(SEQIDNO: 1986)
GRCYQLPQLQGFL,;
CCDS35493.1, Ins, A_7,
(SEQIDNO: 1987)
GSFFQAKGKRKNK,;
CCDS5933.1, Del, A_7,
(SEQIDNO: 1988)
IFLLLEKVGLNFV,;
CCDS34384.1, Ins, A_7,
(SEQIDNO: 1989)
IKDHIFLCDSSRE,;
CCDS6766.1, Ins, A_7,
(SEQIDNO: 1990)
IQIPVSEVYTVLD,;
CCDS46038.1, Ins, A_7,
(SEQIDNO: 1991)
IQPVLHKACHITH,;
CCDS10390.1, Del, A_7,
(SEQIDNO: 1992)
IQVTVKAAIIMAQ,;
CCDS1332.1, Ins, A_7,
(SEQIDNO: 1993)
IRLLKCDRTCWSS,;
CCDS34158.1, Ins, A_7,
(SEQIDNO: 1994)
ISGIHPSSDWSTC,;
CCDS35344.1, Del, A_7,
(SEQIDNO: 1995)
ISVQIVTLQLTRK,;
CCDS9477.1, Ins, A_7,
(SEQIDNO: 1996)
IWERTEGTSTCEK,;
CCDS54749.1, Del, A_7,
(SEQIDNO: 1997)
KASNMKLQILLYS,;
CCDS10033.1, Ins, A_7,
(SEQIDNO: 1998)
KDCKGDDCSQILW,;
CCDS13562.1, Ins, A_7,
(SEQIDNO: 1999)
KDSSDKGHTMPGR,;
CCDS59248.1, Ins, A_7,
(SEQIDNO: 2000)
KDSSDKGRTMPGR,;
CCDS32519.2, Ins, A_7,
(SEQIDNO: 2001)
KEEEDQGVWQGGR,;
CCDS714.1, Ins, A_7,
(SEQIDNO: 2002)
KFGLCRQHFEKIK,;
CCDS44196.1, Ins, A_7,
(SEQIDNO: 2003)
KHNGIWFYYYWWR,;
CCDS9493.1, Ins, A_7,
(SEQIDNO: 2004)
KHVIELSTSLDCG,;
CCDS42422.1, Del, A_7,
(SEQIDNO: 2005)
KIFYSILRDLLGS,;
CCDS4500.1, Ins, A_7,
(SEQIDNO: 2006)
KKGEDSQDEKRQI,;
CCDS34235.1, Ins, A_7,
(SEQIDNO: 2007)
KKGKKESLPRQDD,;
CCDS47693.1, Del, A_7,
(SEQIDNO: 2008)
KKGKRSRNSQTVF,;
CCDS6243.1, Ins, A_7,
(SEQIDNO: 2009)
KLQEFRCYQCETV,;
CCDS2179.1, Ins, A_7,
(SEQIDNO: 2010)
KNHRESYSSTHTL,;
CCDS46063.1, Del, A_7,
(SEQIDNO: 2011)
KNNLSYKNKEERA,;
CCDS1554.1, Ins, A_7,
(SEQIDNO: 2012)
KQGPGQGGRYQQI,;
CCDS35049.1, Ins, A_7,
(SEQIDNO: 2013)
KREKKKKEGTATE,;
CCDS58294.1, Ins, A_7,
(SEQIDNO: 2014)
KRSRGKRKTCQNS,;
CCDS6368.1, Del, A_7,
(SEQIDNO: 2015)
KTTMKQLQCWSRY,;
CCDS31089.1, Del, A_7,
(SEQIDNO: 2016)
LILEKSPINVKKC,;
CCDS5458.2, Del, A_7,
(SEQIDNO: 2017)
LKDIRFWILAWHI,;
CCDS13231.1, Del, A_7,
(SEQIDNO: 2018)
LKRYLILMKLKKV,;
CCDS32879.1, Del, A_7,
(SEQIDNO: 2019)
LKTLRRKKKTRMS,;
CCDS9308.2, Del, A_7,
(SEQIDNO: 2020)
LLYTIIHLFCLKK,;
CCDS41470.1, Del, A_7,
(SEQIDNO: 2022)
LNYLRKGNLNLNQ,;
CCDS12991.1, Del, A_7,
(SEQIDNO: 2023)
LQSHLVQSQQHLH,;
CCDS9270.1, Del, A_7,
(SEQIDNO: 2024)
LSNIRARQEGKSG,;
CCDS34487.1, Del, A_7,
(SEQIDNO: 2026)
LVWMMKKSLISSG,;
CCDS11260.1, Ins, A_7,
(SEQIDNO: 2027)
MFCPCFSLFKFSL,;
CCDS387.2, Del, A_7,
(SEQIDNO: 2028)
MQNLILHLQRKKD,;
CCDS41878.1, Ins, A_7,
(SEQIDNO: 2029)
NARHRTGGEIRYG,;
CCDS54540.1, Ins, A_7,
(SEQIDNO: 2030)
NCCLLFNDFVYIP,;
CCDS1703.1, Ins, A_7,
(SEQIDNO: 2031)
NDFQFPCGSLRLS,;
CCDS42906.1, Ins, A_7,
(SEQIDNO: 2032)
NESYFMDNEEKSG,;
CCDS34146.2, Ins, A_7,
(SEQIDNO: 2033)
NFMVSSTIKSKSS,;
CCDS42164.1, Ins, A_7,
(SEQIDNO: 2034)
NFSFSGIKYNRFT,;
CCDS47329.1, Ins, A_7,
(SEQIDNO: 2035)
NFTQEPFISGDYS,;
CCDS53868.1, Ins, A_7,
(SEQIDNO: 2036)
NGICFLGVCHSRR,;
CCDS54426.1, Ins, A_7,
(SEQIDNO: 2037)
NGLSFTKNARYWL,;
CCDS42016.1, Ins, A_7,
(SEQIDNO: 2038)
NGSIPYQSRKRED,;
CCDS2045.1, Ins, A_7,
(SEQIDNO: 2039)
NHWFTKKDSESFE,;
CCDS34614.1, Ins, A_7,
(SEQIDNO: 2040)
NKCRELCTIVEFC,;
CCDS3572.1, Ins, A_7,
(SEQIDNO: 2041)
NKSCKRARNQRWW,;
CCDS34640.1, Ins, A_7,
(SEQIDNO: 2042)
NNRTEKESLWRFR,;
CCDS32273.1, Ins, A_7,
(SEQIDNO: 2043)
NPKSTCSRQIWEP,;
CCDS8703.1, Ins, A_7,
(SEQIDNO: 2044)
NQQRRKDSWLCEN,;
CCDS53783.1, Ins, A_7,
(SEQIDNO: 2045)
NQRGKHKKQDKIL,;
CCDS41816.1, Ins, A_7,
(SEQIDNO: 2046)
NRFHCASSLIQKQ,;
CCDS46501.1, Ins, A_7,
(SEQIDNO: 2047)
NRPMEGRGYWPEK,;
CCDS12994.1, Ins, A_7,
(SEQIDNO: 2048)
NSEFCGGGNPASL,;
CCDS2039.1, Ins, A_7,
(SEQIDNO: 2049)
NSKKWAHFTVNFQ,;
CCDS6195.1, Ins, A_7,
(SEQIDNO: 2050)
NSSQQKRAKTYYG,;
CCDS7258.1, Ins, A_7,
(SEQIDNO: 2051)
NTGEQATRLPSFC,;
CCDS47170.1, Ins, A_7,
(SEQIDNO: 2052)
NTPASKRKKLTWK,;
CCDS41329.1, Ins, A_7,
(SEQIDNO: 2053)
NTSFKTGGQRLCP,;
CCDS32981.1, Ins, A_7,
(SEQIDNO: 2054)
NTYWRETTELECV,;
CCDS5228.1, Ins, A_7,
(SEQIDNO: 2055)
PCLQAGSCNYPGR,;
CCDS35325.1, Del, A_7,
(SEQIDNO: 2056)
PFLPIQKAASGRG,;
CCDS47878.2, Del, A_7,
(SEQIDNO: 2057)
PLLFIPIFLLQTS,;
CCDS32787.1, Ins, A_7,
(SEQIDNO: 2058)
PPGLLRVLLLWRF,;
CCDS4153.1, Del, A_7,
(SEQIDNO: 2059)
QETQWRQKKIPRF,;
CCDS41508.1, Ins, A_7,
(SEQIDNO: 2060)
QIPRYSSISTSWI,;
CCDS2384.1, Del, A_7,
(SEQIDNO: 2061)
QKFRPTLPPGNSF,;
CCDS34482.1, Del, A_7,
(SEQIDNO: 2062)
QKKQLEDSSWLIK,;
CCDS3573.2, Del, A_7,
(SEQIDNO: 2063)
RKNQRCLTFQPFT,;
CCDS5190.1, Ins, A_7,
(SEQIDNO: 2064)
RKSKKKSKGNRVH,;
CCDS43767.1, Del, A_7,
(SEQIDNO: 2065)
RNFYSLEHFLKLP,;
CCDS43658.1, Ins, A_7,
(SEQIDNO: 2066)
RNGNSQTTSWEDP,;
CCDS8767.1, Ins, A_7,
(SEQIDNO: 2067)
RRHDVPQDLHTEA,;
CCDS9375.1, Ins, A_7,
(SEQIDNO: 2068)
RSFKGQMGRRHNL,;
CCDS55466.1, Del, A_7,
(SEQIDNO: 2069)
RSSFPYRNSCSVF,;
CCDS41948.1, Ins, A_7,
(SEQIDNO: 2070)
RTILDHTRSLSQR,;
CCDS42721.1, Ins, A_7,
(SEQIDNO: 2071)
RTRSLCKNRTYPW,;
CCDS31444.1, Ins, A_7,
(SEQIDNO: 2072)
SAKQRFYLLPRWD,;
CCDS35344.1, Ins, A_7,
(SEQIDNO: 2073)
SAYYEAPQRGSYV,;
CCDS5414.1, Ins, A_7,
(SEQIDNO: 2074)
SEEGLIINRFQHY,;
CCDS53790.1, Ins, A_7,
(SEQIDNO: 2075)
SENSLQRSKTTRR,;
CCDS3877.1, Ins, A_7,
(SEQIDNO: 2076)
SGRCEDCNSHMSI,;
CCDS9111.1, Del, A_7,
(SEQIDNO: 2077)
SLKLILAKFRPKK,;
CCDS47812.1, Del, A_7,
(SEQIDNO: 2078)
SLPEILSRSLWKR,;
CCDS4643.1, Ins, A_7,
(SEQIDNO: 2079)
SPIWKIFQEPKTC,;
CCDS34470.1, Ins, A_7,
(SEQIDNO: 2080)
SRIKMYNICSGFN,;
CCDS10265.1, Del, A_7,
(SEQIDNO: 2081)
SRRRTKKTSSCVS,;
CCDS12394.1, Del, A_7,
(SEQIDNO: 2082)
SRSPASWTKGIGR,;
CCDS34116.1, Del, A_7,
(SEQIDNO: 2083)
SSCLLLASCLSNL,;
CCDS4000.1, Ins, A_7,
(SEQIDNO: 2084)
SYKREFPFQQPLA,;
CCDS679.1, Ins, A_7,
(SEQIDNO: 2085)
TAQEIQKCYFRHI,;
CCDS46789.2, Del, A_7,
(SEQIDNO: 2086)
TDYQEIFMSQSYH,;
CCDS33304.1, Del, A_7,
(SEQIDNO: 2087)
TGPRKNRSGKKWK,;
CCDS47696.1, Ins, A_7,
(SEQIDNO: 2088)
TKPKWAFSLDWLR,;
CCDS2225.1, Ins, A_7,
(SEQIDNO: 2089)
TKSSAACLWSEKD,;
CCDS41816.1, Ins, A_7,
(SEQIDNO: 2090)
TMFRRIGQARKKI,;
CCDS13665.1, Del, A_7,
(SEQIDNO: 2091)
TPGMHHSLILKSI,;
CCDS35344.1, Ins, A_7,
(SEQIDNO: 2092)
TYEDPYWKEDLPM,;
CCDS4692.2, Ins, A_7,
(SEQIDNO: 2093)
TYNASTQEQNKLS,;
CCDS41963.1, Ins, A_7,
(SEQIDNO: 2094)
VLFGCPVNKTGSG,;
CCDS3583.2, Del, A_7,
(SEQIDNO: 2095)
VLKKKHQMRKKMK,;
CCDS8391.1, Ins, A_7,
(SEQIDNO: 2096)
VRWGNAKNTASLL,;
CCDS31423.1, Ins, A_7,
(SEQIDNO: 2097)
VTFQTPEAAPLRP,;
CCDS895.1, Del, A_7,
(SEQIDNO: 2098)
WGIWPALLGECLH,;
CCDS33592.1, Del, A_7,
(SEQIDNO: 2099)
WQQSCSSSLWTSC,;
CCDS56144.1, Ins, A_7,
(SEQIDNO: 2100)
WVSSLTVHREDKG,;
CCDS447.1, Del, A_7,
(SEQIDNO: 2101)
WWRRKYLEFTSYL,;
CCDS30960.1, Del, A_7,
(SEQIDNO: 2102)
YCSVLNVIKHLTE,;
CCDS34158.1, Ins, A_7,
(SEQIDNO: 2103)
YGSKYERVDFTIC,;
CCDS13433.1, Del, A_7,
(SEQIDNO: 2106)
YLVTLGWNTVKNI,;
CCDS1404.1, Del, A_7,
(SEQIDNO: 2107)
YWRKWRNQMPTTS,;
CCDS14065.1, Del, A_7,
(SEQIDNO: 2108)
AHNQILMMLEGL,;
CCDS47704.1, Ins, A_7,
(SEQIDNO: 2110)
ASERGSKGAVWG,;
CCDS47161.1, Del, A_7,
(SEQIDNO: 2111)
CIELNILISWRI,;
CCDS6462.1, Del, A_7,
(SEQIDNO: 2112)
DDPTWHCLRNVA,;
CCDS1803.1, Del, A_7,
(SEQIDNO: 2115)
DLLLKNYYSILL,;
CCDS6301.1, Del, A_7,
(SEQIDNO: 2116)
DQSSRWEKSKDG,;
CCDS4959.1, Ins, A_7,
(SEQIDNO: 2117)
EHSQRLYLQTRF,;
CCDS6049.1, Del, A_7,
(SEQIDNO: 2118)
EITHHPPVWAAL,;
CCDS4500.1, Del, A_7,
(SEQIDNO: 2119)
ERRRQPRRKKAN,;
CCDS10180.1, Ins, A_7,
(SEQIDNO: 2120)
FNSAKSDCILQR,;
CCDS47443.1, Del, A_7,
(SEQIDNO: 2121)
FPLYSLLLVQRI,;
CCDS7148.1, Ins, A_7,
(SEQIDNO: 2122)
FSYFLLHLCWFG,;
CCDS1840.1, Del, A_7,
(SEQIDNO: 2124)
GLIFLTTIFISV,;
CCDS45672.1, Del, A_7,
(SEQIDNO: 2125)
GLPQKELKGIQL,;
CCDS42172.1, Ins, A_7,
(SEQIDNO: 2126)
GPQSYSMDCDHS,;
CCDS43789.1, Ins, A_7,
(SEQIDNO: 2127)
GSQAYSPSIKNK,;
CCDS43100.1, Ins, A_7,
(SEQIDNO: 2128)
GSRTSSKIKKGG,;
CCDS454.1, Del, A_7,
(SEQIDNO: 2130)
HINRLRSVCHLI,;
CCDS4966.1, Del, A_7,
(SEQIDNO: 2131)
HLGRLYLLLKQE,;
CCDS9719.1, Ins, A_7,
(SEQIDNO: 2132)
HRQKFVGKGGTL,;
CCDS31064.1, Ins, A_7,
(SEQIDNO: 2133)
IARERLFSLLQG,;
CCDS30888.1, Ins, A_7,
(SEQIDNO: 2134)
ICKSGKDTWRHH,;
CCDS44689.1, Del, A_7,
(SEQIDNO: 2135)
IFRIRPMAKMMM,;
CCDS10020.1, Del, A_7,
(SEQIDNO: 2136)
IGYLTGFCSPNA,;
CCDS58322.1, Del, A_7,
(SEQIDNO: 2138)
ILLSLLCRYYPV,;
CCDS7883.1, Ins, A_7,
(SEQIDNO: 2139)
IWRHSRVCPGLY,;
CCDS1917.1, Del, A_7,
(SEQIDNO: 2141)
KLFRKYCHQLVL,;
CCDS3707.1, Ins, A_7,
(SEQIDNO: 2143)
KNRKRSGSGNFK,;
CCDS42697.1, Ins, A_7,
(SEQIDNO: 2144)
KQGAFSSSSWEV,;
CCDS9244.1, Ins, A_7,
(SEQIDNO: 2145)
KSKGNPGKKEAT,;
CCDS834.1, Del, A_7,
(SEQIDNO: 2146)
KSQKTLLWMKKP,;
CCDS47641.1, Ins, A_7,
(SEQIDNO: 2147)
KTEKEKRKEEIW,;
CCDS3625.1, Del, A_7,
(SEQIDNO: 2148)
KTILVFTIWARE,;
CCDS34633.1, Ins, A_7,
(SEQIDNO: 2149)
KTQHPPMVSCDG,;
CCDS3004.1, Del, A_7,
(SEQIDNO: 2150)
LCLHSKMTETDY,;
CCDS695.1, Del, A_7,
(SEQIDNO: 2151)
LFHSASQEISQT,;
CCDS34001.1, Del, A_7,
(SEQIDNO: 2152)
LFSDKINPSGGL,;
CCDS3193.1, Del, A_7,
(SEQIDNO: 2153)
LGGDMRFLHFSY,;
CCDS33179.1, Del, A_7,
(SEQIDNO: 2154)
LKKEAVVRSFKS,;
CCDS43729.1, Ins, A_7,
(SEQIDNO: 2155)
LKKTPSLQTHQS,;
CCDS5018.1, Del, A_7,
(SEQIDNO: 2156)
LLKIPRTLKIRI,;
CCDS43068.2, Del, A_7,
(SEQIDNO: 2157)
LLWLADCVGVTR,;
CCDS43505.1, Del, A_7,
(SEQIDNO: 2158)
LNRLPQRRTMKI,;
CCDS46450.1, Del, A_7,
(SEQIDNO: 2159)
LPQSMCFTASQL,;
CCDS41745.1, Del, A_7,
(SEQIDNO: 2160)
LQKSWFIQHWSV,;
CCDS10024.2, Del, A_7,
(SEQIDNO: 2161)
LRKRKLPQKLNA,;
CCDS53460.1, Del, A_7,
(SEQIDNO: 2162)
LSQLRPRLSLYS,;
CCDS781.1, Del, A_7,
(SEQIDNO: 2164)
MIYLLLKLMHPI,;
CCDS45497.1, Ins, A_7,
(SEQIDNO: 2165)
NAFTIEAEGRGE,;
CCDS42656.1, Ins, A_7,
(SEQIDNO: 2166)
NCRSGKHFFQML,;
CCDS13692.1, Ins, A_7,
(SEQIDNO: 2167)
NCSEPASSEVLA,;
CCDS10594.1, Ins, A_7,
(SEQIDNO: 2168)
NEVFLQKQRGFH,;
CCDS54765.1, Ins, A_7,
(SEQIDNO: 2169)
NGEVTGWRRWDK,;
CCDS47430.1, Ins, A_7,
(SEQIDNO: 2170)
NKANAGDGGAGQ,;
CCDS43629.1, Ins, A_7,
(SEQIDNO: 2171)
NKKYHLYVPTHN,;
CCDS1327.1, Ins, A_7,
(SEQIDNO: 2172)
NKPEKIPSCHRW,;
CCDS42794.1, Ins, A_7,
(SEQIDNO: 2174)
NPRWLEPLSSSL,;
CCDS41899.1, Ins, A_7,
(SEQIDNO: 2175)
NQIRSHEQLSCQ,;
CCDS2381.1, Ins, A_7,
(SEQIDNO: 2176)
NQWRFCGRDARR,;
CCDS35086.1, Ins, A_7,
(SEQIDNO: 2177)
NSCTENYRKKGG,;
CCDS43758.1, Ins, A_7,
(SEQIDNO: 2178)
NSTKPATSKSHL,;
CCDS9188.1, Ins, A_7,
(SEQIDNO: 2179)
NTFPRDTEWTLE,;
CCDS2176.2, Ins, A_7,
(SEQIDNO: 2180)
NTYEMPKDFIWH,;
CCDS54426.1, Ins, A_7,
(SEQIDNO: 2181)
NVAKITTTENVF,;
CCDS32537.1, Del, A_7,
(SEQIDNO: 2182)
PFSVQMTSGSMG,;
CCDS164.1, Del, A_7,
(SEQIDNO: 2184)
PNQREEDLETPG,;
CCDS45069.1, Del, A_7,
(SEQIDNO: 2185)
PSRTRRAFCRRR,;
CCDS47256.1, Del, A_7,
(SEQIDNO: 2186)
PVLPPETHIVDG,;
CCDS58711.1, Del, A_7,
(SEQIDNO: 2187)
QDVMSFSYRNLF,;
CCDS30621.1, Del, A_7,
(SEQIDNO: 2188)
QFLPGLPFLPAS,;
CCDS1703.1, Ins, A_7,
(SEQIDNO: 2189)
QKQCIRFCHQIL,;
CCDS9697.1, Ins, A_7,
(SEQIDNO: 2190)
QLDGSPYFSSLS,;
CCDS46894.1, Del, A_7,
(SEQIDNO: 2191)
QLMSKLIIGTTQ,;
CCDS7281.1, Del, A_7,
(SEQIDNO: 2192)
QNLNHPCQSEAF,;
CCDS13817.1, Del, A_7,
(SEQIDNO: 2193)
QNLTLRITDTRL,;
CCDS56056.1, Ins, A_7,
(SEQIDNO: 2194)
QNLVRSTGDAGH,;
CCDS11870.2, Ins, A_7,
(SEQIDNO: 2195)
QRKFKENTGTTK,;
CCDS14246.1, Del, A_7,
(SEQIDNO: 2196)
QRRFFCSKESPQ,;
CCDS5230.1, Del, A_7,
(SEQIDNO: 2197)
QSPSWKRKAKTP,;
CCDS8391.1, Del, A_7,
(SEQIDNO: 2198)
QVGECQKHSKPF,;
CCDS43750.1, Del, A_7,
(SEQIDNO: 2199)
QWKQKLSNLLLL,;
CCDS3894.1, Ins, A_7,
(SEQIDNO: 2200)
RAFDHFQRGHQR,;
CCDS11838.1, Del, A_7,
(SEQIDNO: 2201)
RFEVVLGTFHLM,;
CCDS42207.1, Del, A_7,
(SEQIDNO: 2202)
RFHSVQSRSGWR,;
CCDS1620.1, Ins, A_7,
(SEQIDNO: 2203)
RHTSKEQGSWAI,;
CCDS53335.1, Ins, A_7,
(SEQIDNO: 2204)
RITFSRKIETNF,;
CCDS42805.1, Del, A_7,
(SEQIDNO: 2205)
RKRRRRKRKRAN,;
CCDS46292.1, Ins, A_7,
(SEQIDNO: 2206)
RLYQKVDRTQTT,;
CCDS47203.1, Del, A_7,
(SEQIDNO: 2207)
RRLQFFVIPFAI,;
CCDS2402.1, Ins, A_7,
(SEQIDNO: 2208)
RRYTKRNSLLLK,;
CCDS3484.1, Ins, A_7,
(SEQIDNO: 2209)
RSQSKQVWRYLG,;
CCDS31906.1, Del, A_7,
(SEQIDNO: 2210)
SGTKSSRKSMNS,;
CCDS44196.1, Del, A_7,
(SEQIDNO: 2211)
SKEWLRNLFHPK,;
CCDS10748.1, Del, A_7,
(SEQIDNO: 2212)
SLREKKKISLGF,;
CCDS8966.1, Del, A_7,
(SEQIDNO: 2213)
SNNTDLKLAFKY,;
CCDS53502.1, Ins, A_7,
(SEQIDNO: 2214)
SRPCKHPFSLSV,;
CCDS47155.1, Del, A_7,
(SEQIDNO: 2215)
SSASAFSRSLHF,;
CCDS6346.2, Del, A_7,
(SEQIDNO: 2216)
SSEGKQPVIFYQ,;
CCDS10042.1, Del, A_7,
(SEQIDNO: 2217)
SWPSLSVLGVKN,;
CCDS55059.1, Ins, A_7,
(SEQIDNO: 2218)
TGPGQPLSHWRL,;
CCDS7490.1, Ins, A_7,
(SEQIDNO: 2219)
TGSQVQEAGEAM,;
CCDS7588.1, Ins, A_7,
(SEQIDNO: 2220)
TKQVGREFLVHK,;
CCDS1332.1, Ins, A_7,
(SEQIDNO: 2221)
TKRATTEDLQEA,;
CCDS10558.1, Ins, A_7,
(SEQIDNO: 2222)
TPISSSHTVFWK,;
CCDS43615.1, Ins, A_7,
(SEQIDNO: 2223)
TTNAEGICSKNY,;
CCDS8655.1, Ins, A_7,
(SEQIDNO: 2224)
TTYNNSNSWSTD,;
CCDS7417.1, Ins, A_7,
(SEQIDNO: 2225)
TVYCSECQLQRH,;
CCDS12098.1, Del, A_7,
(SEQIDNO: 2226)
VKAMALKTTTKI,;
CCDS4516.1, Del, A_7,
(SEQIDNO: 2227)
VTGQKDTSWHPL,;
CCDS3302.2, Ins, A_7,
(SEQIDNO: 2228)
WDFIHLFIHSGCRE,;
CCDS31882.1, Ins, A_7,
(SEQIDNO: 2229)
WISAVPHRKLQH,;
CCDS53868.1, Ins, A_7,
(SEQIDNO: 2230)
WRCKNFLDGARR,;
CCDS32981.1, Del, A_7,
(SEQIDNO: 2232)
YILERNYRTGMC,;
CCDS8324.1, Del, A_7,
(SEQIDNO: 2233)
YLNWVFQKKLRR,;
CCDS47904.1, Ins, A_7,
(SEQIDNO: 2234)
YSKQCFRFFQGK,;
CCDS11870.2, Ins, A_7,
(SEQIDNO: 2235)
AERRKRSSREG,;
CCDS34471.1, Del, A_7,
(SEQIDNO: 2237)
AKPLTHVVFAW,;
CCDS1825.1, Del, A_7,
(SEQIDNO: 2238)
AKTCPQSGTSS,;
CCDS54212.1, Del, A_7,
(SEQIDNO: 2239)
ALHLPWYLHLQ,;
CCDS32742.1, Del, A_7,
(SEQIDNO: 2241)
APRGRALWPRR,;
CCDS10860.1, Del, A_7,
(SEQIDNO: 2242)
ASLNVLLIHQF,;
CCDS9010.1, Del, A_7,
(SEQIDNO: 2243)
CIMDWTRKISD,;
CCDS11144.1, Del, A_7,
(SEQIDNO: 2244)
CKHIFRTWKNS,;
CCDS54258.1, Del, A_7,
(SEQIDNO: 2245)
CQLIENVPLLL,;
CCDS45057.1, Del, A_7,
(SEQIDNO: 2246)
CQQTTSCKLSS,;
CCDS7799.2, Del, A_7,
(SEQIDNO: 2247)
CRLFYKDMLQE,;
CCDS34206.1, Del, A_7,
(SEQIDNO: 2248)
CTTIVLALKKD,;
CCDS660.1, Del, A_7,
(SEQIDNO: 2249)
DEQDHGHPKAR,;
CCDS47238.1, Ins, A_7,
(SEQIDNO: 2250)
DRKSTSFRSNC,;
CCDS3882.1, Del, A_7,
(SEQIDNO: 2251)
DSPSLTTFWNN,;
CCDS8530.1, Del, A_7,
(SEQIDNO: 2252)
DTQIPRTSRWC,;
CCDS43167.1, Del, A_7,
(SEQIDNO: 2253)
EAFTLTMVGFS,;
CCDS9776.2, Del, A_7,
(SEQIDNO: 2254)
ECIWPQMTLLY,;
CCDS34171.1, Ins, A_7,
(SEQIDNO: 2255)
EEKKGKAFFYT,;
CCDS47517.1, Ins, A_7,
(SEQIDNO: 2256)
EERKRGIATGI,;
CCDS6365.1, Ins, A_7,
(SEQIDNO: 2257)
EESETTQDFDH,;
CCDS34235.1, Del, A_7,
(SEQIDNO: 2258)
EGEKRKSPQTR,;
CCDS42654.1, Del, A_7,
(SEQIDNO: 2259)
EIKTLKYPLRK,;
CCDS43226.1, Ins, A_7,
(SEQIDNO: 2260)
EKEKRKEEQVR,;
CCDS58294.1, Del, A_7,
(SEQIDNO: 2261)
EKQRKKKNVSE,;
CCDS5749.1, Del, A_7,
(SEQIDNO: 2262)
FQKRWLLLVQE,;
CCDS7383.1, Del, A_7,
(SEQIDNO: 2263)
FSFYTVNILYI,;
CCDS54695.1, Del, A_7,
(SEQIDNO: 2264)
FTLLSTVNHWE,;
CCDS47253.2, Del, A_7,
(SEQIDNO: 2265)
FYTWTNQYLQN,;
CCDS47630.1, Ins, A_7,
(SEQIDNO: 2266)
GDQEKNKSMQT,;
CCDS34099.1, Ins, A_7,
(SEQIDNO: 2267)
GFVEVAFWRLH,;
CCDS6047.1, Del, A_7,
(SEQIDNO: 2268)
GPHFMRTSLRQ,;
CCDS4125.1, Ins, A_7,
(SEQIDNO: 2269)
HQDDTVFWTQF,;
CCDS31499.1, Del, A_7,
(SEQIDNO: 2270)
HYLSCFYSYTL,;
CCDS7804.1, Ins, A_7,
(SEQIDNO: 2271)
IDLCHRSFYGN,;
CCDS8725.2, Ins, A_7,
(SEQIDNO: 2272)
IEVSRGNLSLQ,;
CCDS35411.1, Ins, A_7,
(SEQIDNO: 2273)
IKQVISPGKGT,;
CCDS10753.1, Del, A_7,
(SEQIDNO: 2274)
ILSFLPIKSGI,;
CCDS1180.3, Ins, A_7,
(SEQIDNO: 2275)
INQRKGWTQRE,;
CCDS33205.1, Ins, A_7,
(SEQIDNO: 2276)
IRCWPHYQDVI,;
CCDS32800.1, Ins, A_7,
(SEQIDNO: 2277)
IRSKGDYKITG,;
CCDS32070.1, Del, A_7,
(SEQIDNO: 2278)
ISLKKKIITVL,;
CCDS45081.1, Ins, A_7,
(SEQIDNO: 2279)
IYRGPGYKDHR,;
CCDS45485.1, Ins, A_7,
(SEQIDNO: 2280)
KARKEEECRRC,;
CCDS43313.1, Ins, A_7,
(SEQIDNO: 2281)
KEDCRNFKCYH,;
CCDS31393.1, Del, A_7,
(SEQIDNO: 2282)
KIINLNTATGL,;
CCDS14667.1, Ins, A_7,
(SEQIDNO: 2283)
KKATGSINRTG,;
CCDS44159.1, Del, A_7,
(SEQIDNO: 2284)
KKNQILLRDYR,;
CCDS6264.1, Ins, A_7,
(SEQIDNO: 2285)
KKRGGHQETSV,;
CCDS35493.1, Del, A_7,
(SEQIDNO: 2286)
KLFSSKRKKKK,;
CCDS41499.1, Del, A_7,
(SEQIDNO: 2287)
KMVLILLKVLH,;
CCDS2146.1, Ins, A_7,
(SEQIDNO: 2288)
KQICTRSENQH,;
CCDS1377.1, Ins, A_7,
(SEQIDNO: 2289)
KQTASFHQAFS,;
CCDS33143.1, Ins, A_7,
(SEQIDNO: 2291)
KRNGGESTETI,;
CCDS7554.1, Del, A_7,
(SEQIDNO: 2292)
KSKLPTMLTQA,;
CCDS31477.1, Ins, A_7,
(SEQIDNO: 2293)
KTGENKEQSQM,;
CCDS59106.1, Del, A_7,
(SEQIDNO: 2294)
LDCMFRRRGMD,;
CCDS53775.1, Del, A_7,
(SEQIDNO: 2295)
LGLNMKRNSKP,;
CCDS47033.1, Del, A_7,
(SEQIDNO: 2296)
LGRSWLLPKTE,;
CCDS6080.1, Del, A_7,
(SEQIDNO: 2297)
LIEEFTHLCSL,;
CCDS2308.1, Del, A_7,
(SEQIDNO: 2298)
LILEEKVVIKG,;
CCDS6277.1, Del, A_7,
(SEQIDNO: 2299)
LISHLMKWAHP,;
CCDS7281.1, Del, A_7,
(SEQIDNO: 2300)
LKITYRVWLHD,;
CCDS55894.1, Del, A_7,
(SEQIDNO: 2301)
LKTLCGSTGWP,;
CCDS790.1, Del, A_7,
(SEQIDNO: 2302)
LKTTTRLMKRA,;
CCDS47907.1, Ins, A_7,
(SEQIDNO: 2303)
LLFLPTRKFPL,;
CCDS54426.1, Del, A_7,
(SEQIDNO: 2304)
LLMRDPHKEKK,;
CCDS8298.1, Del, A_7,
(SEQIDNO: 2305)
LMKKMMKSVRL,;
CCDS9677.1, Del, A_7,
(SEQIDNO: 2306)
LNKFSNCLKKS,;
CCDS722.1, Del, A_7,
(SEQIDNO: 2307)
LPNLKHCLMMS,;
CCDS55698.1, Del, A_7,
(SEQIDNO: 2308)
LPPMIPFVCWE,;
CCDS5865.1, Del, A_7,
(SEQIDNO: 2309)
LPRFYIYLAWM,;
CCDS9269.1, Del, A_7,
(SEQIDNO: 2310)
LSNIRARQEGN,;
CCDS47388.1, Del, A_7,
(SEQIDNO: 2311)
LSSERKRESKS,;
CCDS11260.1, Del, A_7,
(SEQIDNO: 2312)
LTHPLKMYLEK,;
CCDS5754.1, Ins, A_7,
(SEQIDNO: 2313)
MCKCHHQRFAP,;
CCDS2017.2, Ins, A_7,
(SEQIDNO: 2314)
MGCPGNQAGGD,;
CCDS7259.1, Ins, A_7,
(SEQIDNO: 2315)
MGYQRRKKCHN,;
CCDS31623.1, Del, A_7,
(SEQIDNO: 2317)
MQLLTENLQLA,;
CCDS4488.1, Del, A_7,
(SEQIDNO: 2318)
MVKMLVFILKL,;
CCDS33011.1, Ins, A_7,
(SEQIDNO: 2319)
NAEDITKCPDL,;
CCDS46935.1, Ins, A_7,
(SEQIDNO: 2320)
NAKLVSILVRR,;
CCDS10096.1, Del, A_7,
(SEQIDNO: 2321)
NAQKLWKLKPV,;
CCDS34671.1, Ins, A_7,
(SEQIDNO: 2323)
NCLGTRSQNAK,;
CCDS3591.1, Ins, A_7,
(SEQIDNO: 2324)
NFCWWPFSRYT,;
CCDS33943.1, Ins, A_7,
(SEQIDNO: 2325)
NGPDLRKGKRR,;
CCDS56533.1, Ins, A_7,
(SEQIDNO: 2326)
NHTCAGEGPVS,;
CCDS4041.1, Ins, A_7,
(SEQIDNO: 2327)
NIPSTKACTTA,;
CCDS31636.1, Ins, A_7,
(SEQIDNO: 2328)
NKPVNSSCQII,;
CCDS33125.1, Ins, A_7,
(SEQIDNO: 2329)
NPYWTKTLWMF,;
CCDS55457.1, Ins, A_7,
(SEQIDNO: 2330)
NQEKIAGSLGI,;
CCDS4916.1, Ins, A_7,
(SEQIDNO: 2331)
NQGVPSVFSSL,;
CCDS42654.1, Ins, A_7,
(SEQIDNO: 2332)
NQRSTDEGRRL,;
CCDS6795.1, Ins, A_7,
(SEQIDNO: 2333)
NRLGRARQEQG,;
CCDS53335.1, Ins, A_7,
(SEQIDNO: 2335)
NRRRASKKESN,;
CCDS31627.1, Ins, A_7,
(SEQIDNO: 2336)
NSNRWSAGHKP,;
CCDS5013.1, Del, A_7,
(SEQIDNO: 2337)
NSPYLLYGRLG,;
CCDS9867.1, Ins, A_7,
(SEQIDNO: 2338)
NVECAGHSGGF,;
CCDS55264.1, Ins, A_7,
(SEQIDNO: 2339)
NVHKDRLLCLI,;
CCDS46894.1, Ins, A_7,
(SEQIDNO: 2340)
NYGCQEWPDNE,;
CCDS214.1, Ins, A_7,
(SEQIDNO: 2341)
NYKNSGSKPGR,;
CCDS13482.1, Ins, A_7,
(SEQIDNO: 2342)
NYNKSSKEKSV,;
CCDS11983.1, Del, A_7,
(SEQIDNO: 2343)
NYRINFKVPLL,;
CCDS11996.2, Ins, A_7,
(SEQIDNO: 2344)
PGITEPSTCLL,;
CCDS2045.1, Del, A_7,
(SEQIDNO: 2345)
PLVHQKGFRVL,;
CCDS13117.1, Del, A_7,
(SEQIDNO: 2346)
PRLKKKSIQKI,;
CCDS1336.1, Ins, A_7,
(SEQIDNO: 2347)
PTGSPAEVITK,;
CCDS3751.1, Del, A_7,
(SEQIDNO: 2348)
PTYVYHKQKEY,;
CCDS10091.1, Del, A_7,
(SEQIDNO: 2349)
PWSGTLEKEIV,;
CCDS8990.1, Del, A_7,
(SEQIDNO: 2350)
QALRLQSLRRD,;
CCDS55946.1, Ins, A_7,
(SEQIDNO: 2351)
QEHTKFAQSDM,;
CCDS47558.1, Del, A_7,
(SEQIDNO: 2352)
QFLKERKTVDR,;
CCDS41764.1, Del, A_7,
(SEQIDNO: 2353)
QKNSLKFSMIE,;
CCDS55350.1, Ins, A_7,
(SEQIDNO: 2354)
QKPCSPADSEA,;
CCDS42164.1, Del, A_7,
(SEQIDNO: 2355)
RKLAFPQFSSC,;
CCDS2957.1, Ins, A_7,
(SEQIDNO: 2356)
RKQKSSEQSNT,;
CCDS34021.1, Ins, A_7,
(SEQIDNO: 2357)
RKTPCKCQVHR,;
CCDS1069.1, Ins, A_7,
(SEQIDNO: 2358)
RLVHTPKRRRL,;
CCDS31778.2, Ins, A_7,
(SEQIDNO: 2359)
RNQCARNKNCY,;
CCDS4912.1, Ins, A_7,
(SEQIDNO: 2360)
RQTAFEKEKRI,;
CCDS41631.1, Ins, A_7,
(SEQIDNO: 2361)
RRKCCWFSDTT,;
CCDS42791.1, Del, A_7,
(SEQIDNO: 2362)
RRRLSKTKLSV,;
CCDS621.1, Ins, A_7,
(SEQIDNO: 2363)
RRSKKCGRITY,;
CCDS42041.1, Ins, A_7,
(SEQIDNO: 2364)
RSSRKGTRTCV,;
CCDS55317.1, Del, A_7,
(SEQIDNO: 2365)
RVHTFLQLQST,;
CCDS31425.1, Ins, A_7,
(SEQIDNO: 2366)
RWSPAYDWLFS,;
CCDS8323.1, Del, A_7,
(SEQIDNO: 2367)
SEKCRSSLDWR,;
CCDS214.1, Ins, A_7,
(SEQIDNO: 2368)
SESCGRKWRRS,;
CCDS8321.1, Del, A_7,
(SEQIDNO: 2369)
SKECRSSLGWR,;
CCDS34075.1, Del, A_7,
(SEQIDNO: 2370)
SLTKRQKRHV,;
CCDS13093.1, Ins, A_7,
(SEQIDNO: 2371)
SNFRKTVVLPG,;
CCDS8438.1, Ins, A_7,
(SEQIDNO: 2372)
SNLCWERRKFT,;
CCDS46790.1, Ins, A_7,
(SEQIDNO: 2373)
SNRLSCPQRSC,;
CCDS14197.1, Del, A_7,
(SEQIDNO: 2374)
SQALMLGSFMP,;
CCDS14482.1, Ins, A_7,
(SEQIDNO: 2375)
SSSRKTDSEKR,;
CCDS9492.1, Del, A_7,
(SEQIDNO: 2376)
STLPPSIQQIW,;
CCDS41774.1, Del, A_7,
(SEQIDNO: 2377)
SVMSIFQVQPP,;
CCDS4597.1, Del, A_7,
(SEQIDNO: 2378)
TAVSSLASRAW,;
CCDS54238.1, Ins, A_7,
(SEQIDNO: 2379)
TFQMYRMWQSF,;
CCDS11838.1, Ins, A_7,
(SEQIDNO: 2380)
TGSKWCLALFI,;
CCDS3525.1, Ins, A_7,
(SEQIDNO: 2381)
TIHIRSQYSAV,;
CCDS7597.1, Ins, A_7,
(SEQIDNO: 2382)
TKEEKEERASK,;
CCDS47634.1, Del, A_7,
(SEQIDNO: 2383)
TLNQSPEHATR,;
CCDS6339.1, Ins, A_7,
(SEQIDNO: 2384)
TNNTLVPDGFL,;
CCDS33744.1, Del, A_7,
(SEQIDNO: 2385)
TRGCCSLPRKN,;
CCDS44756.1, Ins, A_7,
(SEQIDNO: 2386)
TRSFETFSETS,;
CCDS33092.1, Ins, A_7,
(SEQIDNO: 2387)
TSDNPFRRQTV,;
CCDS33093.2, Ins, A_7,
(SEQIDNO: 2388)
TSDNPLRRETM,;
CCDS33094.1, Ins, A_7,
(SEQIDNO: 2389)
TSDNSLRRETM,;
CCDS41477.2, Ins, A_7,
(SEQIDNO: 2390)
VGRQGKRSSEC,;
CCDS6489.1, Del, A_7,
(SEQIDNO: 2391)
VIHFKKSKIIW,;
CCDS33812.1, Del, A_7,
(SEQIDNO: 2392)
VKGLPRPLKFC,;
CCDS43277.1, Del, A_7,
(SEQIDNO: 2394)
VKPTLWEEGTS,;
CCDS55104.1, Del, A_7,
(SEQIDNO: 2395)
VLLLISRIQKG,;
CCDS34993.1, Del, A_7,
(SEQIDNO: 2396)
VLNLCLLPFLK,;
CCDS53626.1, Del, A_7,
(SEQIDNO: 2397)
VLPQSSVACPG,;
CCDS43758.1, Ins, A_7,
(SEQIDNO: 2398)
VVCRLATSHKF,;
CCDS55991.1, Ins, A_7,
(SEQIDNO: 2399)
VWTQVECVRSI,;
CCDS45822.1, Del, A_7,
(SEQIDNO: 2400)
WKIFRSWGIIP,;
CCDS7490.1, Del, A_7,
(SEQIDNO: 2401)
WKPSTRSWRSD,;
CCDS45703.2, Del, A_7,
(SEQIDNO: 2402)
YPVLTTLQFQG,;
CCDS9308.2, Ins, A_7,
(SEQIDNO: 2403)
YYFTLSSTYFA,;
CCDS42360.1, Del, A_7,
(SEQIDNO: 2404)
AERMRPKVQS,;
CCDS1069.1, Del, A_7,
(SEQIDNO: 2405)
AGTHPQKKTA,;
CCDS43767.1, Ins, A_7,
(SEQIDNO: 2406)
AQDVEPNHFR,;
CCDS34993.1, Del, A_7,
(SEQIDNO: 2407)
AQPGSGLETC,;
CCDS5667.1, Del, A_7,
(SEQIDNO: 2408)
ASVRKHIVGT,;
CCDS47630.1, Ins, A_7,
(SEQIDNO: 2409)
ATPRRKKANP,;
CCDS14214.1, Del, A_7,
(SEQIDNO: 2410)
AYLMYMLPSG,;
CCDS12934.1, Del, A_7,
(SEQIDNO: 2411)
CFQNPLSLLH,;
CCDS33273.1, Ins, A_7,
(SEQIDNO: 2412)
CKVIWGLGSQ,;
CCDS2294.1, Del, A_7,
(SEQIDNO: 2413)
CVQEIMQTGL,;
CCDS722.1, Ins, A_7,
(SEQIDNO: 2414)
EERGTSESRS,;
CCDS53867.1, Ins, A_7,
(SEQIDNO: 2415)
EFKARCQDNR,;
CCDS8439.1, Del, A_7,
(SEQIDNO: 2416)
EGNLIQNRSF,;
CCDS42308.1, Del, A_7,
(SEQIDNO: 2417)
EGRPGENQSP,;
CCDS748.1, Del, A_7,
(SEQIDNO: 2418)
EGWKRRLSKK,;
CCDS46127.1, Ins, A_7,
(SEQIDNO: 2419)
EHNRGYSYVR,;
CCDS7273.1, Del, A_7,
(SEQIDNO: 2420)
EKILIQLKML,;
CCDS55311.1, Del, A_7,
(SEQIDNO: 2421)
EKNVQKQNTT,;
CCDS43426.1, Ins, A_7,
(SEQIDNO: 2422)
EVSSRARDNV,;
CCDS31774.1, Del, A_7,
(SEQIDNO: 2423)
FFWLEPLMAS,;
CCDS9681.1, Ins, A_7,
(SEQIDNO: 2424)
FLGTNETYRN,;
CCDS46419.1, Del, A_7,
(SEQIDNO: 2425)
FLKMEPVSHF,;
CCDS14205.1, Del, A_7,
(SEQIDNO: 2426)
FLVTVGGTLR,;
CCDS41887.1, Del, A_7,
(SEQIDNO: 2427)
FMHLNKGGSS,;
CCDS702.1, Del, A_7,
(SEQIDNO: 2428)
FVSKKRKKWN,;
CCDS34330.1, Ins, A_7,
(SEQIDNO: 2429)
FWGPGFKIWT,;
CCDS56144.1, Del, A_7,
(SEQIDNO: 2430)
GFFPHCPQRR,;
CCDS4895.2, Ins, A_7,
(SEQIDNO: 2431)
GKGCERSKGG,;
CCDS31477.1, Del, A_7,
(SEQIDNO: 2432)
GKREKRPWSL,;
CCDS42039.1, Ins, A_7,
(SEQIDNO: 2433)
GNSNLTGKTH,;
CCDS46063.1, Del, A_7,
(SEQIDNO: 2434)
GRAFPRNQQN,;
CCDS43505.1, Ins, A_7,
(SEQIDNO: 2435)
GSTDSHRGGQ,;
CCDS7422.1, Ins, A_7,
(SEQIDNO: 2436)
GTRWLSQYTV,;
CCDS388.1, Ins, A_7,
(SEQIDNO: 2437)
HERCKRQIGK,;
CCDS1629.2, Del, A_7,
(SEQIDNO: 2438)
HPIRTSLKMN,;
CCDS14259.1, Del, A_7,
(SEQIDNO: 2439)
HQRTSTCHTL,;
CCDS2447.1, Del, A_7,
(SEQIDNO: 2440)
HQSEPTKCAM,;
CCDS9767.1, Del, A_7,
(SEQIDNO: 2441)
HWKRNPKAIW,;
CCDS47264.1, Del, A_7,
(SEQIDNO: 2442)
IQSLMDCWQI,;
CCDS47167.1, Ins, A_7,
(SEQIDNO: 2443)
IRAKVIPVKF,;
CCDS45485.1, Ins, A_7,
(SEQIDNO: 2444)
IRRRYRREAI,;
CCDS31814.1, Ins, A_7,
(SEQIDNO: 2445)
ISREEKYYSL,;
CCDS44612.1, Ins, A_7,
(SEQIDNO: 2446)
ISTESPAPTR,;
CCDS34149.1, Del, A_7,
(SEQIDNO: 2447)
KALKRQMNIS,;
CCDS10171.1, Ins, A_7,
(SEQIDNO: 2448)
KCKNTLGNSE,;
CCDS31275.1, Del, A_7,
(SEQIDNO: 2449)
KCMISIKKEV,;
CCDS46941.1, Ins, A_7,
(SEQIDNO: 2450)
KCQRRWSFQH,;
CCDS43027.1, Ins, A_7,
(SEQIDNO: 2451)
KEIRSFHPVF,;
CCDS9372.1, Ins, A_7,
(SEQIDNO: 2452)
KEKYIHREKT,;
CCDS7095.1, Ins, A_7,
(SEQIDNO: 2453)
KERTTCLSGI,;
CCDS6597.1, Del, A_7,
(SEQIDNO: 2454)
KGAYPNHRSA,;
CCDS2402.1, Del, A_7,
(SEQIDNO: 2455)
KIYKKKQFIA,;
CCDS13482.1, Ins, A_7,
(SEQIDNO: 2456)
KLQKTEDYLC,;
CCDS34146.2, Del, A_7,
(SEQIDNO: 2457)
KLSRRRGQKL,;
CCDS35009.1, Ins, A_7,
(SEQIDNO: 2458)
KQGSLWAGRR,;
CCDS2219.1, Ins, A_7,
(SEQIDNO: 2459)
KQILIFHLLH,;
CCDS14161.1, Del, A_7,
(SEQIDNO: 2460)
KRIMFLNIFY,;
CCDS9233.1, Ins, A_7,
(SEQIDNO: 2461)
KRIQVHKRRR,;
CCDS260.1, Ins, A_7,
(SEQIDNO: 2462)
KSIWTVDTYL,;
CCDS13117.1, Ins, A_7,
(SEQIDNO: 2463)
KTEKETEGSC,;
CCDS32008.1, Del, A_7,
(SEQIDNO: 2464)
KTPFHRIFYL,;
CCDS43171.1, Del, A_7,
(SEQIDNO: 2465)
LEVCCYPLNN,;
CCDS55633.1, Del, A_7,
(SEQIDNO: 2466)
LHLLNLKNQV,;
CCDS2235.1, Del, A_7,
(SEQIDNO: 2467)
LIEIKVPSQK,;
CCDS33268.1, Del, A_7,
(SEQIDNO: 2468)
LIVCRKSFYS,;
CCDS42656.1, Del, A_7,
(SEQIDNO: 2469)
LKKNGIGYYY,;
CCDS8967.1, Del, A_7,
(SEQIDNO: 2470)
LKLRRNIPGI,;
CCDS6526.1, Del, A_7,
(SEQIDNO: 2471)
LKSWRSIDYF,;
CCDS55053.1, Del, A_7,
(SEQIDNO: 2472)
LNIEKENLHL,;
CCDS8713.1, Del, A_7,
(SEQIDNO: 2473)
LNQPKMNWHL,;
CCDS10589.1, Del, A_7,
(SEQIDNO: 2474)
LQHLTNIPER,;
CCDS54426.1, Del, A_7,
(SEQIDNO: 2475)
LRMLPLKQIA,;
CCDS8579.1, Del, A_7,
(SEQIDNO: 2476)
LRQKEIFTHP,;
CCDS33924.1, Del, A_7,
(SEQIDNO: 2477)
LSLKVLKKRG,;
CCDS1765.1, Ins, A_7,
(SEQIDNO: 2478)
LSVQPQMGWK,;
CCDS10333.1, Del, A_7,
(SEQIDNO: 2479)
LVACPDLRRQ,;
CCDS3702.1, Del, A_7,
(SEQIDNO: 2480)
MRQNLQKHLS,;
CCDS31121.1, Ins, A_7,
(SEQIDNO: 2481)
NAERAETSIL,;
CCDS11681.1, Ins, A_7,
(SEQIDNO: 2482)
NCHKKCLFLC,;
CCDS30628.1, Ins, A_7,
(SEQIDNO: 2483)
NEPRLYKECF,;
CCDS7973.1, Ins, A_7,
(SEQIDNO: 2484)
NESKKWGNII,;
CCDS34047.1, Ins, A_7,
(SEQIDNO: 2486)
NHQRPSRVSG,;
CCDS11867.1, Ins, A_7,
(SEQIDNO: 2487)
NISGILRRKD,;
CCDS43284.2, Ins, A_7,
(SEQIDNO: 2488)
NNHSNFLVST,;
CCDS42788.1, Ins, A_7,
(SEQIDNO: 2489)
NNKLCKVLCP,;
CCDS3836.1, Ins, A_7,
(SEQIDNO: 2490)
NNKLFQRGSL,;
CCDS33566.1, Ins, A_7,
(SEQIDNO: 2491)
NQDTSGTWNL,;
CCDS34097.1, Ins, A_7,
(SEQIDNO: 2492)
NQKCGSKPNT,;
CCDS58191.1, Ins, A_7,
(SEQIDNO: 2493)
NRFCSSSSAA,;
CCDS33750.1, Ins, A_7,
(SEQIDNO: 2494)
NRGSCYNPKA,;
CCDS34451.1, Ins, A_7,
(SEQIDNO: 2495)
NRMPWQSTEI,;
CCDS45989.1, Ins, A_7,
(SEQIDNO: 2497)
NSHWREPVWM,;
CCDS32981.1, Ins, A_7,
(SEQIDNO: 2498)
NSYWRATLHM,;
CCDS59371.1, Ins, A_7,
(SEQIDNO: 2499)
NSYWREILQM,;
CCDS33931.1, Ins, A_7,
(SEQIDNO: 2500)
NSYWRETLQM,;
CCDS42537.1, Ins, A_7,
(SEQIDNO: 2501)
NSYWRGTLQI,;
CCDS59367.1, Ins, A_7,
(SEQIDNO: 2502)
NSYWRKTLQM,;
CCDS34530.1, Ins, A_7,
(SEQIDNO: 2503)
NTSAVSWWIH,;
CCDS10550.1, Ins, A_7,
(SEQIDNO: 2504)
NTSKTNKNKL,;
CCDS10111.1, Ins, A_7,
(SEQIDNO: 2505)
NYQFTDCALQ,;
CCDS9982.1, Del, A_7,
(SEQIDNO: 2506)
PASGKPGEEQ,;
CCDS4061.1, Del, A_7,
(SEQIDNO: 2508)
PMEATRVECF,;
CCDS4648.1, Ins, A_7,
(SEQIDNO: 2509)
PQRQGCSACV,;
CCDS44154.2, Ins, A_7,
(SEQIDNO: 2510)
QEGWIQVISA,;
CCDS47583.1, Ins, A_7,
(SEQIDNO: 2511)
QFTYQFFQTH,;
CCDS1336.1, Del, A_7,
(SEQIDNO: 2512)
QNNNWKKSAY,;
CCDS45284.1, Ins, A_7,
(SEQIDNO: 2513)
QPVSPQKSGK,;
CCDS46424.1, Ins, A_7,
(SEQIDNO: 2514)
QRENDWSPQH,;
CCDS46285.1, Del, A_7,
(SEQIDNO: 2515)
QRKETQRKAE,;
CCDS34204.1, Ins, A_7,
(SEQIDNO: 2516)
QRTRRDSVFN,;
CCDS58039.1, Del, A_7,
(SEQIDNO: 2517)
QTRETMTPRA,;
CCDS34777.1, Ins, A_7,
(SEQIDNO: 2518)
QTSQAVGSRL,;
CCDS331.1, Del, A_7,
(SEQIDNO: 2519)
QWSLKHRRKQ,;
CCDS31906.1, Ins, A_7,
(SEQIDNO: 2520)
RAAQNRQGNP,;
CCDS33332.1, Del, A_7,
(SEQIDNO: 2521)
RDYKNYGLED,;
CCDS9287.1, Ins, A_7,
(SEQIDNO: 2522)
RKICRIPGGI,;
CCDS53348.1, Ins, A_7,
(SEQIDNO: 2523)
RNSVFPFIYI,;
CCDS34478.1, Ins, A_7,
(SEQIDNO: 2524)
RPVNSEGGSQ,;
CCDS43628.1, Ins, A_7,
(SEQIDNO: 2525)
RRNEQNKNIS,;
CCDS55850.1, Ins, A_7,
(SEQIDNO: 2526)
RSPCPFKNGG,;
CCDS31282.1, Del, A_7,
(SEQIDNO: 2527)
RTQHPWITPS,;
CCDS32493.1, Ins, A_7,
(SEQIDNO: 2528)
RVFRQALFRR,;
CCDS8703.1, Del, A_7,
(SEQIDNO: 2529)
SAKKKRLLAV,;
CCDS8300.1, Ins, A_7,
(SEQIDNO: 2530)
SAYHSAETPF,;
CCDS53552.1, Ins, A_7,
(SEQIDNO: 2531)
SCSYFASASK,;
CCDS2194.1, Ins, A_7,
(SEQIDNO: 2532)
SFNFIKENIN,;
CCDS31963.1, Ins, A_7,
(SEQIDNO: 2533)
SGRCYNRNKY,;
CCDS33360.1, Del, A_7,
(SEQIDNO: 2534)
SILKQCCCLI,;
CCDS12212.1, Ins, A_7,
(SEQIDNO: 2535)
SIQRCDAGEL,;
CCDS34158.1, Del, A_7,
(SEQIDNO: 2536)
SKAKKRLRKK,;
CCDS3424.1, Del, A_7,
(SEQIDNO: 2537)
SKHFIVKVQK,;
CCDS43423.1, Del, A_7,
(SEQIDNO: 2538)
SLCQKACVIL,;
CCDS13672.1, Ins, A_7,
(SEQIDNO: 2539)
SLFLAASRAE,;
CCDS3829.1, Del, A_7,
(SEQIDNO: 2540)
SQLRKKWTAS,;
CCDS6045.1, Ins, A_7,
(SEQIDNO: 2541)
SRVHMQTGER,;
CCDS34089.1, Del, A_7,
(SEQIDNO: 2542)
STTMMIMKKS,;
CCDS43187.1, Del, A_7,
(SEQIDNO: 2543)
SVFSVSVLKE,;
CCDS8748.2, Ins, A_7,
(SEQIDNO: 2544)
TAERNKRQEK,;
CCDS3981.1, Del, A_7,
(SEQIDNO: 2545)
TEFTVQSIIL,;
CCDS5933.1, Ins, A_7,
(SEQIDNO: 2547)
TFFYYWRKWG,;
CCDS54956.1, Ins, A_7,
(SEQIDNO: 2548)
TGEESTDRQN,;
CCDS54379.1, Ins, A_7,
(SEQIDNO: 2549)
TKYVASTATG,;
CCDS3006.1, Ins, A_7,
(SEQIDNO: 2550)
TLLKRMHFDY,;
CCDS35329.1, Del, A_7,
(SEQIDNO: 2551)
TLSDILVNKN,;
CCDS6848.2, Ins, A_7,
(SEQIDNO: 2552)
TNGISLQHED,;
CCDS4569.1, Ins, A_7,
(SEQIDNO: 2553)
TQNCKAQESS,;
CCDS4255.1, Ins, A_7,
(SEQIDNO: 2554)
TTRFRKTSVL,;
CCDS6223.1, Ins, A_7,
(SEQIDNO: 2555)
TWTHLPEDCN,;
CCDS1515.1, Del, A_7,
(SEQIDNO: 2557)
VILQVRSTAC,;
CCDS41710.1, Del, A_7,
(SEQIDNO: 2558)
VNFVKILMIQ,;
CCDS31448.1, Ins, A_7,
(SEQIDNO: 2559)
VSRMVGKCET,;
CCDS6149.1, Ins, A_7,
(SEQIDNO: 2560)
VSWRGLYTKP,;
CCDS2561.2, Del, A_7,
(SEQIDNO: 2561)
VVTKWKKMNF,;
CCDS33946.1, Del, A_7,
(SEQIDNO: 2562)
VVVVKNGRRY,;
CCDS45081.1, Del, A_7,
(SEQIDNO: 2564)
WHPNRKQLLK,;
CCDS32447.1, Ins, A_7,
(SEQIDNO: 2565)
WRPFLFSESR,;
CCDS9188.1, Del, A_7,
(SEQIDNO: 2566)
YFSKRHGMDP,;
CCDS5091.2, Del, A_7,
(SEQIDNO: 2567)
YLTFPIIYLR,;
CCDS43767.1, Del, A_7,
(SEQIDNO: 2568)
AIQRQSQMR,;
CCDS46928.1, Del, A_7,
(SEQIDNO: 2569)
AIWNSSKKN,;
CCDS53868.1, Del, A_7,
(SEQIDNO: 2570)
AMQKLSGWS,;
CCDS41423.1, Ins, A_7,
(SEQIDNO: 2571)
ASSCQARER,;
CCDS6243.1, Del, A_7,
(SEQIDNO: 2572)
ATRIQVLSV,;
CCDS10734.1, Del, A_7,
(SEQIDNO: 2573)
CLSQCQNML,;
CCDS43278.1, Del, A_7,
(SEQIDNO: 2574)
DIQRKMLVN,;
CCDS34633.1, Del, A_7,
(SEQIDNO: 2575)
DSASPNGIV,;
CCDS2225.1, Del, A_7,
(SEQIDNO: 2576)
EELCCVPLE,;
CCDS14336.1, Del, A_7,
(SEQIDNO: 2578)
EKPGICPGP,;
CCDS6748.1, Del, A_7,
(SEQIDNO: 2579)
ENANMIFKK,;
CCDS41850.1, Ins, A_7,
(SEQIDNO: 2580)
ENSYIYKML,;
CCDS47270.1, Ins, A_7,
(SEQIDNO: 2581)
ETTQNVAGI,;
CCDS34283.1, Del, A_7,
(SEQIDNO: 2582)
FSRYPYQMM,;
CCDS33447.1, Del, A_7,
(SEQIDNO: 2583)
FWTLNKGNF,;
CCDS6969.1, Del, A_7,
(SEQIDNO: 2584)
GFGKARRGK,;
CCDS1113.2, Del, A_7,
(SEQIDNO: 2585)
GGILLSMFL,;
CCDS47757.1, Ins, A_7,
(SEQIDNO: 2586)
GNTRNSKSY,;
CCDS3302.2, Del, A_7,
(SEQIDNO: 2587)
GPSSPSFWV,;
CCDS45045.1, Ins, A_7,
(SEQIDNO: 2588)
GRKCPGVCF,;
CCDS13651.1, Del, A_7,
(SEQIDNO: 2589)
GRRKTLKQK,;
CCDS34613.1, Ins, A_7,
(SEQIDNO: 2590)
GSFLYFSSE,;
CCDS42016.1, Ins, A_7,
(SEQIDNO: 2591)
GVCAISVQL,;
CCDS47630.1, Del, A_7,
(SEQIDNO: 2592)
HHLLRIANL,;
CCDS58179.1, Del, A_7,
(SEQIDNO: 2593)
HLKKVEKLP,;
CCDS7824.1, Del, A_7,
(SEQIDNO: 2594)
HLYYQLLLF,;
CCDS41485.1, Del, A_7,
(SEQIDNO: 2595)
HMYQYRQKV,;
CCDS46339.1, Ins, A_7,
(SEQIDNO: 2596)
HQLADRHCH,;
CCDS13900.2, Del, A_7,
(SEQIDNO: 2597)
HVKKTYADL,;
CCDS46226.1, Del, A_7,
(SEQIDNO: 2598)
HVQSVTSVP,;
CCDS10112.1, Del, A_7,
(SEQIDNO: 2599)
IFLKKRKEL,;
CCDS1479.1, Ins, A_7,
(SEQIDNO: 2600)
ILLQSNSYV,;
CCDS43121.1, Del, A_7,
(SEQIDNO: 2601)
ILRSHFKCP,;
CCDS44410.1, Del, A_7,
(SEQIDNO: 2602)
ILTRAGSVM,;
CCDS14439.1, Ins, A_7,
(SEQIDNO: 2603)
INEKKSVKS,;
CCDS1504.1, Ins, A_7,
(SEQIDNO: 2604)
KCSIVFCGL,;
CCDS46251.1, Ins, A_7,
(SEQIDNO: 2605)
KEIRSCRNE,;
CCDS5955.1, Ins, A_7,
(SEQIDNO: 2606)
KETEKETAN,;
CCDS47168.1, Ins, A_7,
(SEQIDNO: 2607)
KHKEKVLQS,;
CCDS58275.1, Del, A_7,
(SEQIDNO: 2608)
KKAHAPART,;
CCDS9344.1, Del, A_7,
(SEQIDNO: 2609)
KKKLLQFQK,;
CCDS31150.1, Ins, A_7,
(SEQIDNO: 2610)
KKMLTLRYL,;
CCDS42654.1, Ins, A_7,
(SEQIDNO: 2611)
KKSKLSNIH,;
CCDS47157.1, Del, A_7,
(SEQIDNO: 2612)
KKVQESKDL,;
CCDS2474.1, Ins, A_7,
(SEQIDNO: 2613)
KPPRRDSLI,;
CCDS3806.1, Ins, A_7,
(SEQIDNO: 2614)
KQDINHVLP,;
CCDS43378.1, Ins, A_7,
(SEQIDNO: 2615)
KRRREMERL,;
CCDS11643.1, Ins, A_7,
(SEQIDNO: 2616)
KSREGANHE,;
CCDS3509.1, Ins, A_7,
(SEQIDNO: 2617)
KYKEENSEK,;
CCDS4562.1, Del, A_7,
(SEQIDNO: 2618)
LALFPATCS,;
CCDS1332.1, Del, A_7,
(SEQIDNO: 2619)
LAQTGLKSN,;
CCDS8271.1, Ins, A_7,
(SEQIDNO: 2620)
LERYAHANK,;
CCDS45081.1, Ins, A_7,
(SEQIDNO: 2622)
LGTQTGNNY,;
CCDS31858.1, Del, A_7,
(SEQIDNO: 2623)
LKRTLIRQL,;
CCDS45280.1, Del, A_7,
(SEQIDNO: 2624)
LLLCNNALS,;
CCDS7407.1, Del, A_7,
(SEQIDNO: 2625)
LLLMFKYSM,;
CCDS55261.1, Del, A_7,
(SEQIDNO: 2626)
LNLFYEQPN,;
CCDS31439.1, Ins, A_7,
(SEQIDNO: 2627)
LPKFEGSDL,;
CCDS33527.2, Del, A_7,
(SEQIDNO: 2628)
LRCSFYTRN,;
CCDS8342.1, Del, A_7,
(SEQIDNO: 2629)
LRQSIGRKD,;
CCDS55894.1, Del, A_7,
(SEQIDNO: 2630)
LSIACLGLE,;
CCDS34671.1, Del, A_7,
(SEQIDNO: 2631)
LSWNKKSKR,;
CCDS46894.1, Del, A_7,
(SEQIDNO: 2632)
LWMPRMARQ,;
CCDS56579.1, Del, A_7,
(SEQIDNO: 2633)
LWPMKGERK,;
CCDS31650.1, Del, A_7,
(SEQIDNO: 2634)
LWQERKWRN,;
CCDS10722.1, Del, A_7,
(SEQIDNO: 2635)
LYLIDCVNN,;
CCDS47329.1, Del, A_7,
(SEQIDNO: 2636)
LYPRAIYLG,;
CCDS41537.1, Ins, A_7,
(SEQIDNO: 2637)
MGREVRSAN,;
CCDS44337.1, Del, A_7,
(SEQIDNO: 2638)
MKLEHQGAA,;
CCDS31060.1, Ins, A_7,
(SEQIDNO: 2639)
NAERAFFRL,;
CCDS45285.1, Ins, A_7,
(SEQIDNO: 2640)
NAVKEDGST,;
CCDS1802.1, Ins, A_7,
(SEQIDNO: 2641)
NCKRQWTRS,;
CCDS9694.1, Ins, A_7,
(SEQIDNO: 2643)
NERKIQRPG,;
CCDS41577.1, Ins, A_7,
(SEQIDNO: 2644)
NFLSKSKIM,;
CCDS13996.1, Ins, A_7,
(SEQIDNO: 2645)
NGAKQDSSH,;
CCDS3628.1, Del, A_7,
(SEQIDNO: 2646)
NGLTGSFKS,;
CCDS46789.2, Ins, A_7,
(SEQIDNO: 2647)
NKRSFFDND,;
CCDS6063.1, Del, A_7,
(SEQIDNO: 2648)
NLYYVQLQL,;
CCDS6781.3, Ins, A_7,
(SEQIDNO: 2649)
NNYKNGDPD,;
CCDS34937.1, Ins, A_7,
(SEQIDNO: 2650)
NPTDEWRRS,;
CCDS47044.1, Ins, A_7,
(SEQIDNO: 2651)
NRKPMCYGL,;
CCDS30769.2, Ins, A_7,
(SEQIDNO: 2652)
NRRDRCKGT,;
CCDS42411.1, Ins, A_7,
(SEQIDNO: 2653)
NRRKTQITV,;
CCDS55597.1, Ins, A_7,
(SEQIDNO: 2654)
NRRQVFGKA,;
CCDS6281.1, Ins, A_7,
(SEQIDNO: 2655)
NSLRVLNSS,;
CCDS14205.1, Ins, A_7,
(SEQIDNO: 2656)
NSWLPLGGH,;
CCDS13315.1, Ins, A_7,
(SEQIDNO: 2657)
NSYTQGECP,;
CCDS14538.1, Ins, A_7,
(SEQIDNO: 2658)
NVPCPSLEC,;
CCDS31523.1, Ins, A_7,
(SEQIDNO: 2659)
NVWEKSGYQ,;
CCDS47115.1, Ins, A_7,
(SEQIDNO: 2660)
NWESVFHYK,;
CCDS55843.1, Ins, A_7,
(SEQIDNO: 2661)
NWSKSTKTN,;
CCDS41939.1, Ins, A_7,
(SEQIDNO: 2662)
NYNKNITAD,;
CCDS47415.1, Ins, A_7,
(SEQIDNO: 2663)
NYSASVTGS,;
CCDS13568.1, Del, A_7,
(SEQIDNO: 2664)
PALREYTMM,;
CCDS53783.1, Del, A_7,
(SEQIDNO: 2665)
PERKTQKTG,;
CCDS45149.1, Del, A_7,
(SEQIDNO: 2666)
PKLRYLGEY,;
CCDS8788.1, Del, A_7,
(SEQIDNO: 2667)
PLPAFPGTS,;
CCDS12635.1, Ins, A_7,
(SEQIDNO: 2668)
PQWRKSIQM,;
CCDS59452.1, Ins, A_7,
(SEQIDNO: 2669)
PRNQLDSRL,;
CCDS9390.2, Ins, A_7,
(SEQIDNO: 2670)
QKGSVQFEE,;
CCDS47885.1, Del, A_7,
(SEQIDNO: 2671)
QKTVSSGKV,;
CCDS46785.1, Ins, A_7,
(SEQIDNO: 2672)
QRFMAGPCM,;
CCDS6673.1, Del, A_7,
(SEQIDNO: 2673)
QRKKRKFAH,;
CCDS14622.1, Del, A_7,
(SEQIDNO: 2674)
QRPVKMFLR,;
CCDS9967.1, Del, A_7,
(SEQIDNO: 2675)
QSLRTSAKS,;
CCDS5611.1, Ins, A_7,
(SEQIDNO: 2676)
QTISEISEN,;
CCDS2397.1, Ins, A_7,
(SEQIDNO: 2677)
RCKCSARLI,;
CCDS9543.1, Ins, A_7,
(SEQIDNO: 2678)
RCQDWKHRR,;
CCDS11915.1, Del, A_7,
(SEQIDNO: 2679)
REDFLLEMF,;
CCDS12639.1, Ins, A_7,
(SEQIDNO: 2680)
RFNFKAEDF,;
CCDS41644.1, Ins, A_7,
(SEQIDNO: 2681)
RKERQGKEE,;
CCDS5135.1, Ins, A_7,
(SEQIDNO: 2682)
RKGEEKKKT,;
CCDS53507.1, Ins, A_7,
(SEQIDNO: 2683)
RKSSRYKQL,;
CCDS834.1, Ins, A_7,
(SEQIDNO: 2684)
RNPRKLCCG,;
CCDS33619.1, Del, A_7,
(SEQIDNO: 2685)
RNSQKNWRK,;
CCDS43655.2, Del, A_7,
(SEQIDNO: 2686)
RNVIKILFL,;
CCDS41878.1, Del, A_7,
(SEQIDNO: 2687)
RPSQNRRRN,;
CCDS53427.1, Ins, A_7,
(SEQIDNO: 2688)
RQEIQEKYE,;
CCDS54808.1, Ins, A_7,
(SEQIDNO: 2689)
RQRFQMEDQ,;
CCDS7452.1, Ins, A_7,
(SEQIDNO: 2690)
RRAPWWDNT,;
CCDS54659.1, Ins, A_7,
(SEQIDNO: 2692)
RRRNMEGRL,;
CCDS3633.1, Del, A_7,
(SEQIDNO: 2693)
RRSKITKII,;
CCDS46776.1, Ins, A_7,
(SEQIDNO: 2694)
RRVRNCQQK,;
CCDS8293.1, Ins, A_7,
(SEQIDNO: 2695)
RTLEKNFNV,;
CCDS10932.1, Ins, A_7,
(SEQIDNO: 2696)
SCLLSSRCQ,;
CCDS55871.1, Del, A_7,
(SEQIDNO: 2697)
SGRLNLLMF,;
CCDS12272.1, Ins, A_7,
(SEQIDNO: 2698)
SHWRETLQM,;
CCDS4966.1, Ins, A_7,
(SEQIDNO: 2699)
SIWEDCIYC,;
CCDS2234.1, Del, A_7,
(SEQIDNO: 2700)
SLSKSMAIM,;
CCDS10967.1, Ins, A_7,
(SEQIDNO: 2701)
SNYSKRTGA,;
CCDS34086.1, Del, A_7,
(SEQIDNO: 2702)
SPEAWKRNS,;
CCDS9291.1, Ins, A_7,
(SEQIDNO: 2703)
SPQSCPKGE,;
CCDS43426.1, Ins, A_7,
(SEQIDNO: 2704)
SSESTCPCR,;
CCDS3519.1, Del, A_7,
(SEQIDNO: 2706)
STIMAPLKF,;
CCDS33993.1, Del, A_7,
(SEQIDNO: 2707)
STRQKQTAI,;
CCDS32708.1, Del, A_7,
(SEQIDNO: 2708)
TAFTKLAPA,;
CCDS11504.2, Del, A_7,
(SEQIDNO: 2709)
TAFTKLAPT,;
CCDS58090.1, Ins, A_7,
(SEQIDNO: 2710)
TEGKYFCTK,;
CCDS10317.1, Ins, A_7,
(SEQIDNO: 2711)
THRGGEGSG,;
CCDS2061.1, Ins, A_7,
(SEQIDNO: 2712)
TPLDIFYKE,;
CCDS46445.1, Ins, A_7,
(SEQIDNO: 2713)
TRKEKRRDA,;
CCDS55959.1, Del, A_7,
(SEQIDNO: 2714)
TRPQKIPHP,;
CCDS5419.1, Del, A_7,
(SEQIDNO: 2715)
TSRSSAMNA,;
CCDS47230.1, Del, A_7,
(SEQIDNO: 2716)
VALMSSTII,;
CCDS2209.2, Ins, A_7,
(SEQIDNO: 2717)
VDRYFQSEL,;
CCDS260.1, Del, A_7,
(SEQIDNO: 2718)
VHMDCGYLS,;
CCDS2867.1, Ins, A_7,
(SEQIDNO: 2719)
VMLLFSHPK,;
CCDS41878.1, Del, A_7,
(SEQIDNO: 2720)
VTRETTLIL,;
CCDS6158.1, Ins, A_7,
(SEQIDNO: 2721)
WWCCYYSLL,;
CCDS46097.1, Del, A_7,
(SEQIDNO: 2722)
YFQKMIFLK,;
CCDS43720.1, Del, A_7,
(SEQIDNO: 2723)
YQKYLFQLK,;
CCDS47955.1, Ins, A_7,
(SEQIDNO: 2724)
YRKFQKASL,;
CCDS42690.1, Del, A_7,
(SEQIDNO: 2725)
YYRSTIIVV,;
CCDS7880.1, Ins, A_7,
(SEQIDNO: 2727)
AHPFKTTL,;
CCDS1038.1, Del, A_7,
(SEQIDNO: 2728)
AMKKATKS,;
CCDS31636.1, Del, A_7,
(SEQIDNO: 2729)
AMLVFIHLR,;
CCDS32064.1, Ins, A_7,
(SEQIDNO: 2730)
AQRERSWT,;
CCDS55218.1, Ins, A_7,
(SEQIDNO: 2731)
AREVRTSH,;
CCDS34283.1, Ins, A_7,
(SEQIDNO: 2732)
ASAGTLIR,;
CCDS42705.1, Del, A_7,
(SEQIDNO: 2733)
CIMWTLTM,;
CCDS2201.1, Ins, A_7,
(SEQIDNO: 2734)
CKIRVFSK,;
CCDS34106.1, Del, A_7,
(SEQIDNO: 2735)
CLKKLQSY,;
CCDS55123.1, Del, A_7,
(SEQIDNO: 2736)
CLKLFLSS,;
CCDS11028.1, Del, A_7,
(SEQIDNO: 2737)
CQKICHMK,;
CCDS10151.1, Del, A_7,
(SEQIDNO: 2738)
CSLSHQEK,;
CCDS56403.1, Ins, A_7,
(SEQIDNO: 2739)
DSVRGKES,;
CCDS56405.1, Ins, A_7,
(SEQIDNO: 2740)
DSVRGKGV,;
CCDS34206.1, Ins, A_7,
(SEQIDNO: 2741)
DVLQLFLH,;
CCDS44172.1, Ins, A_7,
(SEQIDNO: 2742)
EHNRRPIQ,;
CCDS5795.1, Ins, A_7,
(SEQIDNO: 2743)
EHTGSTEK,;
CCDS43278.1, Ins, A_7,
(SEQIDNO: 2744)
EIFKERCL,;
CCDS33282.2, Del, A_7,
(SEQIDNO: 2745)
EKKYLITS,;
CCDS32234.1, Del, A_7,
(SEQIDNO: 2746)
EKRRKLQN,;
CCDS42796.1, Ins, A_7,
(SEQIDNO: 2747)
ERKIKETV,;
CCDS32755.1, Del, A_7,
(SEQIDNO: 2748)
ESRRHSGQ,;
CCDS5055.1, Ins, A_7,
(SEQIDNO: 2749)
ESSDDSWN,;
CCDS6462.1, Ins, A_7,
(SEQIDNO: 2750)
ETTLRGTV,;
CCDS3091.1, Del, A_7,
(SEQIDNO: 2751)
FFNPEKCG,;
CCDS2057.1, Ins, A_7,
(SEQIDNO: 2752)
FQNLLSYH,;
CCDS43720.1, Ins, A_7,
(SEQIDNO: 2754)
FTRNTSFS,;
CCDS35373.1, Ins, A_7,
(SEQIDNO: 2755)
GDGRNSTR,;
CCDS2482.1, Ins, A_7,
(SEQIDNO: 2756)
GGGENGSG,;
CCDS47324.1, Ins, A_7,
(SEQIDNO: 2757)
GISGESTS,;
CCDS14401.1, Ins, A_7,
(SEQIDNO: 2758)
GIWGESTS,;
CCDS56130.1, Del, A_7,
(SEQIDNO: 2759)
GRRSFLVL,;
CCDS58490.1, Del, A_7,
(SEQIDNO: 2760)
HCWFQHHD,;
CCDS12345.1, Ins, A_7,
(SEQIDNO: 2761)
HESRLQQR,;
CCDS13568.1, Ins, A_7,
(SEQIDNO: 2762)
HQPSGSTQ,;
CCDS10050.1, Ins, A_7,
(SEQIDNO: 2763)
IFIFDCCF,;
CCDS2882.1, Ins, A_7,
(SEQIDNO: 2764)
IFNFASRE,;
CCDS5011.1, Del, A_7,
(SEQIDNO: 2765)
IFSKYSKC,;
CCDS46368.1, Ins, A_7,
(SEQIDNO: 2766)
IKDCKHLF,;
CCDS6346.2, Ins, A_7,
(SEQIDNO: 2767)
ILQKENSP,;
CCDS7428.1, Del, A_7,
(SEQIDNO: 2768)
ILRLNDKP,;
CCDS32265.1, Del, A_7,
(SEQIDNO: 2769)
IMKMHKYL,;
CCDS34565.1, Ins, A_7,
(SEQIDNO: 2771)
INSRCGSQ,;
CCDS10501.1, Ins, A_7,
(SEQIDNO: 2772)
IQSELPPY,;
CCDS3846.1, Ins, A_7,
(SEQIDNO: 2773)
IRVVIESN,;
CCDS32280.1, Ins, A_7,
(SEQIDNO: 2774)
ISRNGKRT,;
CCDS3505.1, Ins, A_7,
(SEQIDNO: 2775)
IWSIVRQL,;
CCDS55698.1, Ins, A_7,
(SEQIDNO: 2776)
KAEYYYCG,;
CCDS31167.1, Del, A_7,
(SEQIDNO: 2777)
KARKLMRK,;
CCDS1387.1, Del, A_7,
(SEQIDNO: 2778)
KATKLETC,;
CCDS10307.1, Ins, A_7,
(SEQIDNO: 2779)
KCCEAQAL,;
CCDS41963.1, Ins, A_7,
(SEQIDNO: 2780)
KCFARSLF,;
CCDS3123.1, Ins, A_7,
(SEQIDNO: 2781)
KGCKQKEL,;
CCDS34225.1, Ins, A_7,
(SEQIDNO: 2782)
KGTPQLSA,;
CCDS30974.1, Ins, A_7,
(SEQIDNO: 2783)
KHQIRESE,;
CCDS13662.1, Ins, A_7,
(SEQIDNO: 2784)
KHQSYELC,;
CCDS46785.1, Del, A_7,
(SEQIDNO: 2785)
KIHGWTMY,;
CCDS387.2, Ins, A_7,
(SEQIDNO: 2786)
KIRFFPDL,;
CCDS47625.1, Del, A_7,
(SEQIDNO: 2787)
KIRKFIPT,;
CCDS54597.1, Ins, A_7,
(SEQIDNO: 2788)
KKKLWKLI,;
CCDS33524.1, Ins, A_7,
(SEQIDNO: 2789)
KKLEVSVP,;
CCDS1322.1, Del, A_7,
(SEQIDNO: 2790)
KKRTRIIM,;
CCDS34204.1, Del, A_7,
(SEQIDNO: 2791)
KNQERFSI,;
CCDS14435.1, Ins, A_7,
(SEQIDNO: 2792)
KNSKYKRF,;
CCDS46393.1, Ins, A_7,
(SEQIDNO: 2793)
KNWFLQGL,;
CCDS47973.1, Ins, A_7,
(SEQIDNO: 2794)
KQASTSHC,;
CCDS12328.1, Ins, A_7,
(SEQIDNO: 2795)
KQSQGTSS,;
CCDS1296.2, Ins, A_7,
(SEQIDNO: 2796)
KRRPQTRP,;
CCDS46919.1, Del, A_7,
(SEQIDNO: 2797)
KSNDLEYT,;
CCDS47238.1, Del, A_7,
(SEQIDNO: 2798)
KSQAIQRK,;
CCDS2135.1, Ins, A_7,
(SEQIDNO: 2799)
KTKKQQSV,;
CCDS702.1, Ins, A_7,
(SEQIDNO: 2800)
KTKTSISC,;
CCDS2561.2, Ins, A_7,
(SEQIDNO: 2801)
KWLPNGKR,;
CCDS33318.1, Del, A_7,
(SEQIDNO: 2802)
LFRMEAII,;
CCDS34740.1, Ins, A_7,
(SEQIDNO: 2803)
LGKEISNM,;
CCDS3520.1, Del, A_7,
(SEQIDNO: 2804)
LKRLYIKV,;
CCDS14781.1, Del, A_7,
(SEQIDNO: 2805)
LNFLWVVS,;
CCDS41577.1, Del, A_7,
(SEQIDNO: 2806)
LPFKEQNH,;
CCDS7485.1, Ins, A_7,
(SEQIDNO: 2807)
LPNARKID,;
CCDS1113.2, Del, A_7,
(SEQIDNO: 2808)
LPRETMDN,;
CCDS53552.1, Del, A_7,
(SEQIDNO: 2809)
LQLLCKCQ,;
CCDS3981.1, Ins, A_7,
(SEQIDNO: 2810)
LQNSLFSP,;
CCDS13303.1, Del, A_7,
(SEQIDNO: 2811)
LSLRFETR,;
CCDS34506.1, Ins, A_7,
(SEQIDNO: 2812)
LWIQRFQY,;
CCDS53502.1, Del, A_7,
(SEQIDNO: 2813)
LYRIKKLV,;
CCDS6160.1, Ins, A_7,
(SEQIDNO: 2814)
MHQKSSDF,;
CCDS55937.1, Ins, A_7,
(SEQIDNO: 2815)
MVYTHVNY,;
CCDS34312.1, Del, A_7,
(SEQIDNO: 2816)
MWKNLTGT,;
CCDS46348.1, Ins, A_7,
(SEQIDNO: 2817)
NADSSALC,;
CCDS46938.1, Ins, A_7,
(SEQIDNO: 2818)
NAERTRNI,;
CCDS8436.1, Ins, A_7,
(SEQIDNO: 2819)
NALCFLCI,;
CCDS45280.1, Ins, A_7,
(SEQIDNO: 2820)
NCCYATMH,;
CCDS31826.2, Ins, A_7,
(SEQIDNO: 2821)
NCISFKKV,;
CCDS702.1, Ins, A_7,
(SEQIDNO: 2822)
NCPGISWK,;
CCDS45277.1, Ins, A_7,
(SEQIDNO: 2823)
NDGKASQN,;
CCDS43789.1, Ins, A_7,
(SEQIDNO: 2824)
NEEKQGRL,;
CCDS8609.1, Ins, A_7,
(SEQIDNO: 2825)
NEQTTKHQ,;
CCDS46557.1, Ins, A_7,
(SEQIDNO: 2826)
NFGDEERL,;
CCDS45985.1, Ins, A_7,
(SEQIDNO: 2827)
NFSWSKIM,;
CCDS43337.1, Ins, A_7,
(SEQIDNO: 2828)
NGGIGKKR,;
CCDS46152.1, Ins, A_7,
(SEQIDNO: 2829)
NHGVVQRL,;
CCDS31821.1, Ins, A_7,
(SEQIDNO: 2830)
NIIIEQAI,;
CCDS9684.1, Del, A_7,
(SEQIDNO: 2831)
NIKCLQRN,;
CCDS45703.2, Ins, A_7,
(SEQIDNO: 2832)
NKAAKWIL,;
CCDS14435.1, Del, A_7,
(SEQIDNO: 2833)
NLQTLRKK,;
CCDS31177.1, Ins, A_7,
(SEQIDNO: 2834)
NNSWKGKA,;
CCDS41302.1, Ins, A_7,
(SEQIDNO: 2835)
NPGKIQKA,;
CCDS11180.1, Ins, A_7,
(SEQIDNO: 2836)
NPHWRKTL,;
CCDS7269.1, Ins, A_7,
(SEQIDNO: 2838)
NPSIASHE,;
CCDS33125.1, Ins, A_7,
(SEQIDNO: 2839)
NPYWGKAL,;
CCDS41815.1, Ins, A_7,;
(SEQIDNO: 2840)
NRGCNCHF,;
CCDS34681.1, Del, A_7,
(SEQIDNO: 2841)
NSERSCNL,;
CCDS34494.2, Ins, A_7,
(SEQIDNO: 2842)
NSGSGATS,;
CCDS32918.1, Ins, A_7,
(SEQIDNO: 2843)
NSHWREPI,;
CCDS1660.1, Ins, A_7,
(SEQIDNO: 2844)
NSKKKEYT,;
CCDS43157.1, Ins, A_7,
(SEQIDNO: 2845)
NSKWRLEA,;
CCDS43171.1, Ins, A_7,
(SEQIDNO: 2846)
NSKYVAIL,;
CCDS7639.1, Ins, A_7,
(SEQIDNO: 2847)
NSPRPSNL,;
CCDS7548.1, Ins, A_7,
(SEQIDNO: 2848)
NSSCESNI,;
CCDS7256.1, Ins, A_7,
(SEQIDNO: 2849)
NSSRRSTR,;
CCDS35067.1, Ins, A_7,
(SEQIDNO: 2850)
NSYWRETL,;
CCDS31089.1, Ins, A_7,
(SEQIDNO: 2851)
NSYWRKAL,;
CCDS55970.1, Ins, A_7,
(SEQIDNO: 2852)
NTSQWPDE,;
CCDS34908.1, Ins, A_7,
(SEQIDNO: 2853)
NTYTGCYI,;
CCDS32208.1, Del, A_7,
(SEQIDNO: 2854)
NVLRLTSC,;
CCDS34109.2, Ins, A_7,
(SEQIDNO: 2855)
NVWRPERV,;
CCDS34613.1, Ins, A_7,
(SEQIDNO: 2856)
NWKRHGHN,;
CCDS10239.1, Ins, A_7,
(SEQIDNO: 2857)
NYPFAINM,;
CCDS31823.1, Del, A_7,
(SEQIDNO: 2858)
PFQPAPHM,;
CCDS35086.1, Del, A_7,
(SEQIDNO: 2859)
PLRKVRRL,;
CCDS41470.1, Ins, A_7,
(SEQIDNO: 2860)
PWESGQAV,;
CCDS47955.1, Del, A_7,
(SEQIDNO: 2861)
QEVSKSKF,;
CCDS42411.1, Del, A_7,
(SEQIDNO: 2862)
QFRLLVLL,;
CCDS2545.1, Ins, A_7,
(SEQIDNO: 2863)
QGGGGEVY,;
CCDS10239.1, Del, A_7,
(SEQIDNO: 2864)
QIICAQTL,;
CCDS1853.1, Del, A_7,
(SEQIDNO: 2865)
QIMYMKLY,;
CCDS5232.1, Del, A_7,
(SEQIDNO: 2866)
QIPACCLH,;
CCDS41507.1, Ins, A_7,
(SEQIDNO: 2867)
QIPRYSSI,;
CCDS861.1, Del, A_7,;
(SEQIDNO: 2868)
QIRKNSLL,;
CCDS7658.1, Ins, A_7,
(SEQIDNO: 2869)
QISQHPSQ,;
CCDS8493.1, Del, A_7,
(SEQIDNO: 2870)
QKKRLLGA,;
CCDS33267.1, Del, A_7,;
(SEQIDNO: 2871)
QNCLTSWK,;
CCDS2922.1, Del, A_7,
(SEQIDNO: 2872)
RFQWPLRP,;
CCDS14448.1, Ins, A_7,
(SEQIDNO: 2873)
RGATEYCL,;
CCDS2751.1, Ins, A_7,
(SEQIDNO: 2874)
RHSERSCQ,;
CCDS7554.1, Ins, A_7,
(SEQIDNO: 2875)
RKASCLQC,;
CCDS3210.1, Ins, A_7,
(SEQIDNO: 2876)
RKREKKRW,;
CCDS54624.1, Ins, A_7,
(SEQIDNO: 2877)
RMGGTIQE,;
CCDS10096.1, Ins, A_7,
(SEQIDNO: 2878)
RMLRSYGS,;
CCDS1336.1, Del, A_7,
(SEQIDNO: 2880)
RQKKPLYL,;
CCDS8328.2, Ins, A_7,
(SEQIDNO: 2881)
RQPQKKNS,;
CCDS46495.1, Ins, A_7,
(SEQIDNO: 2882)
RQSYERKI,;
CCDS43767.1, Ins, A_7,;
(SEQIDNO: 2883)
RQYRGKAR,;
CCDS2749.2, Ins, A_7,;
(SEQIDNO: 2884)
RRFPYWEG,;
CCDS43513.2, Ins, A_7,
(SEQIDNO: 2885)
RSVHPFHL,;
CCDS4200.2, Del, A_7,
(SEQIDNO: 2886)
RTMKQLIA,;
CCDS59357.1, Del, A_7,
(SEQIDNO: 2887)
RTWLPTSS,;
CCDS4117.1, Ins, A_7,
(SEQIDNO: 2888)
RVNSDLEN,;
CCDS11614.1, Ins, A_7,
(SEQIDNO: 2889)
RWTHADNS,;
CCDS42029.1, Del, A_7,
(SEQIDNO: 2890)
RYLRMMTS,;
CCDS2938.1, Ins, A_7,
(SEQIDNO: 2891)
SFIHEEDC,;
CCDS10748.1, Del, A_7,
(SEQIDNO: 2892)
SGPALNSP,;
CCDS13039.1, Ins, A_7,
(SEQIDNO: 2893)
SICKHLAL,;
CCDS1852.1, Ins, A_7,
(SEQIDNO: 2894)
SIRNKGRN,;
CCDS34501.1, Del, A_7,
(SEQIDNO: 2895)
SKHMEKKV,;
CCDS54447.1, Del, A_7,
(SEQIDNO: 2896)
SMETKLII,;
CCDS33770.2, Ins, A_7,
(SEQIDNO: 2897)
SPVEERAR,;
CCDS34283.1, Ins, A_7,
(SEQIDNO: 2898)
SSSFLGHH,;
CCDS9148.2, Ins, A_7,
(SEQIDNO: 2899)
SSTKKALS,;
CCDS32238.1, Del, A_7,
(SEQIDNO: 2900)
SSWSWILL,;
CCDS43309.1, Ins, A_7,
(SEQIDNO: 2901)
STKIHIGY,;
CCDS42400.1, Ins, A_7,
(SEQIDNO: 2903)
SVPEAATR,;
CCDS34293.1, Del, A_7,
(SEQIDNO: 2904)
SWLPELVG,;
CCDS11069.2, Ins, A_7,
(SEQIDNO: 2905)
TAEGSLWT,;
CCDS5279.1, Del, A_7,
(SEQIDNO: 2906)
TAVTLMVM,;
CCDS874.1, Del, A_7,
(SEQIDNO: 2907)
TLLHGKNV,;
CCDS2234.1, Ins, A_7,
(SEQIDNO: 2908)
TPYQSLWP,;
CCDS42366.1, Ins, A_7,
(SEQIDNO: 2909)
TQGRRWDI,;
CCDS58846.1, Del, A_7,
(SEQIDNO: 2910)
TRRTLTRW,;
CCDS42172.1, Del, A_7,
(SEQIDNO: 2911)
TTVILHGL,;
CCDS10034.1, Ins, A_7,
(SEQIDNO: 2912)
TVPWKWGL,;
CCDS1604.1, Del, A_7,
(SEQIDNO: 2913)
TVYIILRM,;
CCDS47878.2, Del, A_7,
(SEQIDNO: 2914)
TWKQATLN,;
CCDS55971.1, Ins, A_7,
(SEQIDNO: 2915)
TWYYQRRK,;
CCDS12273.1, Ins, A_7,
(SEQIDNO: 2916)
TYENAQSI,;
CCDS58578.1, Del, A_7,
(SEQIDNO: 2917)
TYRPEWNL,;
CCDS44172.1, Del, A_7,
(SEQIDNO: 2918)
VFMNKTLM,;
CCDS55858.1, Ins, A_7,
(SEQIDNO: 2919)
VKEFRRFS,;
CCDS2758.1, Del, A_7,
(SEQIDNO: 2920)
VKRNRIVK,;
CCDS11260.1, Del, A_7,
(SEQIDNO: 2921)
VLPLFLIV,;
CCDS5394.1, Del, A_7,
(SEQIDNO: 2922)
VMSMEMIL,;
CCDS4993.1, Del, A_7,
(SEQIDNO: 2923)
VNNFFKKL,;
CCDS2207.1, Ins, A_7,
(SEQIDNO: 2924)
VRLLEESI,;
CCDS46584.1, Ins, A_7,
(SEQIDNO: 2925)
VSNCNTKH,;
CCDS54404.1, Del, A_7,
(SEQIDNO: 2926)
VTELAVAQ,;
CCDS45149.1, Del, A_7,
(SEQIDNO: 2927)
VTKLLQSK,;
CCDS54694.1, Del, A_7,
(SEQIDNO: 2928)
WLLRETLP,;
CCDS14649.1, Del, A_7,
(SEQIDNO: 2929)
WRLCIHLL,;
CCDS6479.1, Del, A_7,
(SEQIDNO: 2930)
YGDSKLVR,;
CCDS3556.1, Ins, A_7,
(SEQIDNO: 2931)
YLLGKFCS,;
CCDS10167.1, Ins, A_7,
(SEQIDNO: 2932)
YLSALYSD,;
CCDS3198.1, Ins, A_7,
(SEQIDNO: 2933)
YSSLWWKS,;
CCDS41953.1, Del, A_7,
(SEQIDNO: 2934)
YYQNLHNL,;
CCDS43277.1, Del, A_8,
(SEQIDNO: 2935)
FFLCLKKEVWNVTRNRLKIQYQMHLRSFLLLLLLHRVLQGKAILWLPVVL
WIIFQILVTVKFLHDPVLLAIRLLTQCQSHCTMRGARGILSASWKQT,;
CCDS55581.1, Del, A_8,
(SEQIDNO: 2936)
DSIVKPRDFLIRRMISQDLGSTMLFTSHRCPTVSHCPRKELACFPQCAPD
WTPSFLNTLQRMHTLSHRILFPRETLVIRVPACSSCQAL,;
CCDS11861.1, Del, A_8,
(SEQIDNO: 2937)
LILIQHGGIFTFRFWVEKLSWNICKNLSLYLDKFVQRLLYVYIIETNVFV
LNLFHVPVNQIFMMAFYLKYTEKAWVMELEWLIQQQCYQ,;
CCDS6948.1, Del, A_8,
(SEQIDNO: 2938)
RKSPITRNLRQWPCLRASRVHTLKDHRWAVRLGLWKAVQLLKGSRNPTVQ
RRSLRKGSLRLSKGHECLVMIFQCPVRTLRAHSLIQ,;
CCDS7430.1, Del, A_8,
(SEQIDNO: 2939)
EKIKPKKTVKSHHIKNPDYLLQKRPPRKKIKDIHLQRNLKILYLETLMRK
KVLQNLNFGRVHYQRQMKNHRKKNLMSIFRICFY,;
CCDS42721.1, Del, A_8,
(SEQIDNO: 2941)
RKDRRAKNRVLMIMIAKNWKIKIQNQKRLQNRKWKCTLGVMMMMILTNFL
KKLKGKLKNQIRSGMGQRRMRITVKKLKSVQE,;
CCDS47535.1, Del, A_8,
(SEQIDNO: 2942)
RRRKRRDIQENQRTLLKIQNCTYPGSPAWRLSPSSGEPRVAFLSLVARLW
KASDLSVRKRNTYGWKAGMTGVVSLSMARVI,;
CCDS47492.1, Del, A_8,
(SEQIDNO: 2943)
IPRLLVSRPPSLHPSQQAETRPERLLAPLIQKKQLALKHQLRHPLHPPHL
VPKLQRRQFLAKQGQWGPPRAREKLTSSQ,;
CCDS43354.1, Del, A_8,
(SEQIDNO: 2945)
TKDLIAHSLVTVMAEKNFVKRRRNILMIAQKKGFTSSLPCLKIVIAVTTS
SLGKSDGHERRKVVVILQLRNKNH,;
CCDS786.1, Ins, A_8,
(SEQIDNO: 2946)
IRTMVEAAFGRRHCWCCLSNKHCPFGPSENHDAGSRFKIRQNEHIWWLST
DGKRRRYPLALEGKWYKRHQNCS,;
CCDS1146.1, Del, A_8,
(SEQIDNO: 2947)
RKRKGGRKRRKKLQHLKGMMQMRSTQNMLSRTSEKARRRKGDIKKERSQM
KERVQLKGMRRRTLQEQVGLGN,;
CCDS34854.1, Del, A_8,
(SEQIDNO: 2948)
SLPQKVLRRKLTEHIQRPSVVLEVLLTHFWTFLMIQMLLCTKVDSWLGKF
MQIWMERRLQEENEDGKPFMLY,;
CCDS3986.1, Del, A_8,
(SEQIDNO: 2950)
ILLYWSFWNDCRMGLLVSMELQKNPLGYLERASFVVMKMKLTLPLYIALC
VQLICALSVLKLLILQRH,;
CCDS55244.1, Del, A_8,
(SEQIDNO: 2951)
MLQKQCCYNLVIKHPLIFRINLRRQGKTKDGVVQSLGFLNQQIILQKEFF
ICLLMFIKRWKPAATK,;
CCDS11877.1, Del, A_8,
(SEQIDNO: 2952)
SMEIAKFPFPLKIIEKCILMKTAIALKMRLTGRILVMIPTDQQNRFPLLK
RALLEKEKISPPNMMK,;
CCDS53456.1, Ins, A_8,
(SEQIDNO: 2953)
KELASKFLQQSVQYKKGAQVSFLILGYRGDCYTRLFSPLIPQTTAWFYRD
CFTLHQVLHLVLRGH,;
CCDS47176.1, Del, A_8,
(SEQIDNO: 2955)
IRLLRNRLKRQNVKHLCLRLWTLPLKTSVTKLKLKRKGGACRTTASCTAS
SVSCCQMFPRGTHP,;
CCDS5024.1, Del, A_8,
(SEQIDNO: 2956)
RSLLYSRMCLVQIPTHTWEPDYFVSLPMMFSWATQSFPVGAVFLTRPAIP
CCSCTSHSNPWSQS,;
CCDS879.1, Del, A_8,
(SEQIDNO: 2957)
TRKHKHFYWKHLKFIGNWILKQFLHKLYLEISHQLIMAYPKIKETICGHL
PKILYLHHCQRHIQ,;
CCDS2557.1, Del, A_8,
(SEQIDNO: 2958)
SLLFKLVGILLSDANQMLFPGQLSLGKEERRPLDKAKEYFSWRMAASRYI
ILPGQMLDHIHA,;
CCDS42281.1, Del, A_8,
(SEQIDNO: 2959)
TYMEMHYGHQAPQVAMLPKLLCRQMLPTLSTLQQRHPQGPCPPPVTPLRV
QSVLLLGVPQTA,;
CCDS55009.1, Del, A_8,
(SEQIDNO: 2960)
QFEERERGKNESARNPGISPGAFPVGLAQSGESICLYKIRRRVNVPAKTQ
TRVARRGSLS,;
CCDS46919.1, Del, A_8,
(SEQIDNO: 2961)
SSKDKNLALLREHLVGGRLFYMWISLEKQASNAFFSQEEQRCYLVILYLY
LKRPHIFFLT,;
CCDS44839.1, Del, A_8,
(SEQIDNO: 2962)
SEKDIMQLMLISILGRSGALLQHFRISSFLRPSLIYIFLLITQHNLFILC
HVLIILSKI,;
CCDS45847.1, Del, A_8,
(SEQIDNO: 2963)
CYLFIHWNYLSFLKGQIIREMSFHLLNYRTSNISHQWIRLHFQKALEIKH
ISKGVHRVG,;
CCDS45057.1, Del, A_8,
(SEQIDNO: 2964)
FMRNFLNMLCFENILLHLHQIMKFLLRQPGQGIWKLRLIQPSLWLSLWIR
PNLLLFHI,;
CCDS1838.1, Del, A_8,
(SEQIDNO: 2965)
QRLQSPHTPLVFSFIWPLSTLQINVCLSKKFIAGFWTIFHILLLHQQAGR
ILFDIICP,;
CCDS12661.1, Ins, A_8,
(SEQIDNO: 2966)
KSAAERTRGSRACGDRAHSGDTGASGSAVPVHHQEEEEAQRERNLRARRQ
DSEAGTD,;
CCDS4488.1, Del, A_8,
(SEQIDNO: 2967)
RSINTEVNIRNINIPQKKTRIKNINISINIRNTKEKRLLMLLIKRVCLQQ
KELNLMI,;
CCDS11885.1, Del, A_8,
(SEQIDNO: 2968)
DLRKNKEQPAKTGPSQKRTGRRGGSIKVLIPTMEHRTGFTLAATGTEITS
ICLTFI,;
CCDS46063.1, Del, A_8,
(SEQIDNO: 2969)
RKSCLCGRHLWHCTMFCGCCSSDIQKTALLGWNSSTSSWTCTNLSPPESR
SCFRSC,;
CCDS41355.1, Del, A_8,
(SEQIDNO: 2971)
SKQQGVPQVSLVEIEFISVKEAAVLVEHAELILQQNCMEKIVNSFLIKYK
QKKHP,;
CCDS55008.1, Del, A_8,
(SEQIDNO: 2972)
QFEERERGKNESARNPVPVGLAQSGESICLYKIRRRVNVPAKTQTRVARR
GSLS,;
CCDS41941.1, Del, A_8,
(SEQIDNO: 2973)
RRNNTRFQQMTNYCMILKKITEIRPGLMHREGVTMVWDHRDHVNNSLFQI
VMLS,;
CCDS34535.1, Del, A_8,
(SEQIDNO: 2974)
TNSTRFLTSETYLLNRENQKKQLQVALNRSHLEQMKTNTKEEMTRHLTLL
VKRS,;
CCDS56156.1, Ins, A_8,
(SEQIDNO: 2975)
KQHPRASCHRNSLVKCNEHCGMEQKRGACSRASHQALEAIQPSTCCLYYS
RSV,;
CCDS33301.1, Del, A_8,
(SEQIDNO: 2976)
TALKYIFVAVRAICVMKSFLIFRRWKSHSPLQIQLHLSHPITTSCSIPWC
HLC,;
CCDS34865.1, Del, A_8,
(SEQIDNO: 2978)
TRTSLHQATRKHIIIPLERRSPQAHKLWMIVIIKDIFLMKRFLTLASAHV
GV,;
CCDS110.1, Ins, A_8,
(SEQIDNO: 2979)
STKDVQPASSQPASEQHPLTVHIPYCFSTTRLPNTAQVLAAAVLPSAVYA
V,;
CCDS2738.1, Del, A_8,
(SEQIDNO: 2980)
STRPSGSFLSSWRCFSFSGHPTMWLSFSLPINPSYLEMTVSGASIWTWSC
W,;
CCDS34116.1, Del, A_8,
(SEQIDNO: 2981)
ILFHYPHFWKDFLATSSPTRRRRQRRTVTCQIMVMMWMGGKTPWLNHVS
C,;
CCDS34882.1, Del, A_8,
(SEQIDNO: 2982)
PQQRAPLVELKILARGSHSSRPGSHPRRHIQSQLSQALELGQPSTDFI
L,;
CCDS41745.1, Del, A_8,
(SEQIDNO: 2983)
ICPWKRQPGAVAQRIGSHLVPTATLFLLNQHLGKTVRRTVLEWRLTCW,;
CCDS781.1, Ins, A_8,
(SEQIDNO: 2984)
RTWLFNSRKWNCTKPWADFSFKFMPQVYVPTTFQHNPSKHCKCLGKRA,;
CCDS42031.1, Del, A_8,
(SEQIDNO: 2985)
TRRKKRSKRRGKSSRRMKEGRRRRRMPRRRRRGKIPNLSSRRFPSQT,;
CCDS5999.1, Del, A_8,
(SEQIDNO: 2986)
MKREKLKEMKKSVQCCVFNFMDTILLLIVYLKQMLRNLSPEAIGIH,;
CCDS43512.1, Del, A_8,
(SEQIDNO: 2987)
QLALKHQLRHPLHPPHLVPKLQRRQFLAKQGQWGPPRAREKLTSSQ,;
CCDS11459.2, Del, A_8,
(SEQIDNO: 2988)
STTKCQSGTAETYNSWKVKNLQLEPRRVTSQMNRQVKDMTAILSQS,;
CCDS8652.1, Del, A_8,
(SEQIDNO: 2990)
TTLAFQKSLPWPKLLPKTRSMTHLTEKPRKKSLLGPLTQIHQILLS,;
CCDS44410.1, Del, A_8,
(SEQIDNO: 2992)
KTKNLPLKTKLKKKENKTTLNLQMAEHHLLCPRIMNKAQPYGIC,;
CCDS33736.1, Ins, A_8,
(SEQIDNO: 2993)
KVRGPGHLHDRGAEEILQCHEEVGLQEAPEAHPTAPEQVPGFCL,;
CCDS45798.1, Del, A_8,
(SEQIDNO: 2994)
MDLDGMLTVIGQGLVGMTPRDLGTVAGATAQIQRPIQVQTGGRL,;
CCDS6948.1, Del, A_8,
(SEQIDNO: 2996)
RKSPVTGNMRHWPCLKDRKQAERPGLICRNPSLLWAWMMKLHNY,;
CCDS42472.1, Del, A_8,
(SEQIDNO: 2997)
RRRHQPPTPTPRPIRTGPSLSRWPWRGRRPPPPLPPPPPTPMCL,;
CCDS55045.1, Del, A_8,
(SEQIDNO: 2998)
TLNWKREPRLSYLKTMYSSLFWSQFPFLQCCHHHHLHHHYHEIVL,;
CCDS5434.1, Ins, A_8,
(SEQIDNO: 2999)
KDNKAAIGKGQVQETGSERAREEQDARPQRRSGQLKKSGPLLF,;
CCDS43384.1, Ins, A_8,
(SEQIDNO: 3000)
KQGCLSQLQQHHRQHSGKLQLTQHCFSKPRLCKDGEQRRLFRA,;
CCDS47093.1, Del, A_8,
(SEQIDNO: 3001)
PSLALMCFLRRRSGLHPWTCFVQLTETSLQERLPHIVVVTLRQ,;
CCDS42183.1, Del, A_8,
(SEQIDNO: 3002)
PTCMIIREFILEKNPILVRNVGKTSAEVQLLLNTREFILEINS,;
CCDS42411.1, Del, A_8,
(SEQIDNO: 3003)
QNWKKTSKMINQPRKSMCQKRGTLKRNETRLKRKARNLLGRKK,;
CCDS32146.1, Del, A_8,
(SEQIDNO: 3004)
REPLVLPPSKRSLLSVGNLIGLPIMPSRCENSSLGGMLEMSMH,;
CCDS5343.1, Ins, A_8,
(SEQIDNO: 3005)
RRVHFQTARGLFSSSHNREQASQPKDSRTKKEPSRTEKGYAVF,;
CCDS7944.1, Ins, A_8,
(SEQIDNO: 3006)
KFDAEVKVNRRYLRKGRICFYSAKAANLFQKLREFQFFTNEK,;
CCDS1807.1, Del, A_8,
(SEQIDNO: 3007)
RNLILMIKVHKFEHHLLPSPLHNLSKYTDKLQKARMLLPPKA,;
CCDS6367.2, Del, A_8,
(SEQIDNO: 3008)
MKLTLAVLPTLRNLHCYPQLCLQGRLAARNANMNLEILLGV,;
CCDS8336.2, Del, A_8,
(SEQIDNO: 3011)
RARNRNMKKTMSHLIAHQALKMSGLRLFHPRLLTRKKPGK,;
CCDS43379.1, Del, A_8,
(SEQIDNO: 3012)
SLRKILDVLSSPPVTGKNKENLKNISETNISQPKLTSGRF,;
CCDS33203.1, Del, A_8,
(SEQIDNO: 3013)
IMKLSNRDKMRKGWYRALLQYLVKTTNGSEKVKKRLENF,;
CCDS33197.2, Del, A_8,
(SEQIDNO: 3014)
PYPISEGLTMTTGRNINSNSLMTNCLFSPIFLCHHAIMH,;
CCDS31158.1, Ins, A_8,
(SEQIDNO: 3016)
SPISGGHCNLWRCIFSSASIFLQGQHGYLFQSILHARRV,;
CCDS35317.1, Del, A_8,
(SEQIDNO: 3017)
TCSKATFGTSLSPFATPTRSGTCCWAWTAPTAWTVAWTP,;
CCDS35003.1, Ins, A_8,
(SEQIDNO: 3019)
KGQDERTREASLRWWRVVFYAHTSGSHRQRWRSYSCRI,;
CCDS2738.1, Ins, A_8,
(SEQIDNO: 3020)
KVQGHPAHFCHHGGVFHFLDTLQCGYPSLFLSIHLIWK,;
CCDS41335.1, Del, A_8,
(SEQIDNO: 3021)
LLKNSLQRLFVLELGVSLIQMTCRGWHTFWSTWYSWVV,;
CCDS5089.1, Ins, A_8,
(SEQIDNO: 3022)
NFQFCHLQGDSLCSVGSWNTTCTFWILCALCSLDETCK,;
CCDS46501.1, Del, A_8,
(SEQIDNO: 3023)
RLPGLTCKVRRTLHQLKLCQRVMILSVVFQILMTCQWP,;
CCDS55008.1, Ins, A_8,
(SEQIDNO: 3026)
ISSRKGKGAKTKAQEIPSLWALLRAEKAFVCTRSADV,;
CCDS7281.1, Ins, A_8,
(SEQIDNO: 3027)
KEKQPTTKDNQGSQQKCGISQDFKPWKIKAINSRKRC,;
CCDS9393.1, Del, A_8,
(SEQIDNO: 3029)
RKERNQFFTFFVIPVIVVLKIKKSMTNTCLNIQNALN,;
CCDS7484.1, Ins, A_8,
(SEQIDNO: 3030)
KEVWDQKRCSKILVDEGSVQNFLHGAPEIIPTEASE,;
CCDS44912.1, Del, A_8,
(SEQIDNO: 3032)
LQNASLKLTREAVRNPAQKNPQPIYHHWIPREPTRS,;
CCDS42869.1, Del, A_8,
(SEQIDNO: 3033)
SWHCGCRRQRRAWRLPTPSAHRWRRPSCGYRQSQRM,;
CCDS47833.1, Ins, A_8,
(SEQIDNO: 3034)
KFPDPGDKCHPRGPGGPHPQKEEEDLRVPHCLCPE,;
CCDS8062.1, Ins, A_8,
(SEQIDNO: 3035)
KGQCCEARQGCHSPPPSPAPFCSGLGLCPRSTLPS,;
CCDS35317.1, Ins, A_8,
(SEQIDNO: 3036)
KLAQRPLSELHSLLLRHLHGLGLAAGHGPPRQPGL,;
CCDS4261.1, Ins, A_8,
(SEQIDNO: 3037)
KSHLLSTSFSNPGFCGVCGHSVRSNHIQSLQVEAV,;
CCDS32064.1, Ins, A_8,
(SEQIDNO: 3038)
KYDLGRSTCRTTFPDPYSCLDQSKPKCVHLPRTLG,;
CCDS13134.1, Ins, A_8,
(SEQIDNO: 3039)
MFTGNLSRSRARALPRSFLPSGFLQSEIPHAACAV,;
CCDS10111.1, Ins, A_8,
(SEQIDNO: 3040)
RGSRSKTRGKNFRKEKNSREDKRERTATEEKARRN,;
CCDS58259.1, Del, A_8,
(SEQIDNO: 3041)
IAQLMKDQRIIKVPQIVCGLRIVLRKKRTVFLRQ,;
CCDS10168.2, Del, A_8,
(SEQIDNO: 3042)
IRVIEVARHKPLSKKKRKDRLRNLKKKKARILRK,;
CCDS31000.1, Del, A_8,
(SEQIDNO: 3043)
ISFRVLASSWYASLPSPSCNLWMPSTKIRLFTAI,;
CCDS5434.1, Del, A_8,
(SEQIDNO: 3044)
RQQSCDWKGSSSGDRKRTRARGTGCTASTTLWTT,;
CCDS56348.1, Del, A_8,
(SEQIDNO: 3045)
CGKSIWWLKELRVLMFLHLWDSMKQVALHQSNR,;
CCDS56566.1, Del, A_8,
(SEQIDNO: 3046)
IITVRGSITTMKGTDQGACLVTDQGLHLPGLTG,;
CCDS30860.1, Del, A_8,
(SEQIDNO: 3047)
KEKDIHLLIEKKNMEKTIITQVKKRKTRLKILD,;
CCDS9097.1, Ins, A_8,
(SEQIDNO: 3048)
KFKTKTKSWPLCCCNRHSIVFLEWKRWLQKSTE,;
CCDS7391.1, Ins, A_8,
(SEQIDNO: 3049)
KGLSSTHQGAQAVQYMQTCVGKRHKNNCVGSEV,;
CCDS43346.1, Ins, A_8,
(SEQIDNO: 3050)
KPVNWTNSAICNKWEIVSMGTDQASHCRCATTL,;
CCDS4306.1, Del, A_8,
(SEQIDNO: 3051)
KRRRKQKRPQPKILSHRPRRKRRKRRRQQSRLY,;
CCDS2557.1, Ins, A_8,
(SEQIDNO: 3052)
KVFCSSWWGYCYRMQTKCFSQGSYLLEKRNGDP,;
CCDS47329.1, Ins, A_8,
(SEQIDNO: 3053)
KVHDRAAQKARAMERGIREQQPVLNLRDTTTSL,;
CCDS13177.1, Ins, A_8,
(SEQIDNO: 3054)
MLEQIRALQETMQRWRSSERYMQKSSSLLHSIQ,;
CCDS4168.1, Del, A_8,
(SEQIDNO: 3055)
MLKSRQGTSGSTLTWAATWISTLLGLPSGVLWC,;
CCDS58899.1, Ins, A_8,
(SEQIDNO: 3056)
NANQDFTFYPECDCNSKNYRACPPKDQVRGSVL,;
CCDS6551.2, Del, A_8,
(SEQIDNO: 3057)
SQKSQHHCALRKIEWATKLSLGGKAGPQAQEKA,;
CCDS5343.1, Del, A_8,
(SEQIDNO: 3058)
TCPFPDCERPFLFVTQQRTSLTAQRLQNQEGAL,;
CCDS43556.1, Del, A_8,
(SEQIDNO: 3059)
WILVNLFSGTSKAPFLCGGIDQTSQPSAGPRGT,;
CCDS53936.1, Del, A_8,
(SEQIDNO: 3061)
KHKYSWICFLTESGMEHFSTPVREDPWIWWTL,;
CCDS7434.1, Ins, A_8,
(SEQIDNO: 3062)
KRSQGAAFFTNDKHVGHFDGLLPSQRFQLQQA,;
CCDS11965.1, Del, A_8,
(SEQIDNO: 3063)
MILFQLTFSCCLALSLTASAMWKQQNWMEKPI,;
CCDS45016.1, Del, A_8,
(SEQIDNO: 3064)
REPRERLYQDTSLMMIVLTIQNAAFLSNIRMA,;
CCDS53722.1, Del, A_8,
(SEQIDNO: 3065)
RGPRRKVLMVLWLPANQSLQKSQVFQWVLRTE,;
CCDS5636.1, Ins, A_8,
(SEQIDNO: 3066)
SKRKLFLAFWLTVETRLFAVIHMFFGIFSGCI,;
CCDS813.1, Del, A_8,
(SEQIDNO: 3067)
TRTREVSPRHSTLTASRRSSTASTSWEGWPPG,;
CCDS53450.1, Del, A_8,
(SEQIDNO: 3068)
YFVELMISMIQRVQQDQQIGSIKVDYHPHGFL,;
CCDS33309.1, Del, A_8,
(SEQIDNO: 3069)
ALYVKWRQIFTLQRRCQKKDQVTASFLLRLY,;
CCDS7148.1, Del, A_8,
(SEQIDNO: 3070)
IPSSSCALTLQMNKFSIIIINMCLHGNRMNT,;
CCDS9097.1, Del, A_8,
(SEQIDNO: 3071)
IQDQDQELATVLLQSALDCIFGVEEMATKKH,;
CCDS35325.1, Ins, A_8,
(SEQIDNO: 3072)
KGQDERTREASFRWWRDVFYAHTSGPHRQRW,;
CCDS47911.1, Del, A_8,
(SEQIDNO: 3073)
LRVQLIFQLLPMDFKPQQGMLLVIIVYRHQL,;
CCDS34195.1, Del, A_8,
(SEQIDNO: 3074)
RATFLLALWECSLPQARLCLIVSRTLLLVQS,;
CCDS30576.1, Del, A_8,
(SEQIDNO: 3075)
SSRADGLLCSSKSTTEVIRNVAKDGRLAGRL,;
CCDS43384.1, Del, A_8,
(SEQIDNO: 3076)
TRMFIPAAAAPPPAQWETPAHTTLLLKAPTL,;
CCDS43993.1, Ins, A_8,
(SEQIDNO: 3077)
KERKRESRPGGTGRATILFVTQTQDSKGKG,;
CCDS32017.1, Ins, A_8,
(SEQIDNO: 3078)
KHLLCWMFSPVLFLLLFGYIRMLAFDCDGL,;
CCDS55010.1, Del, A_8,
(SEQIDNO: 3079)
QFEERERGKNESARNPGISPGACTLVPAAV,;
CCDS31590.1, Del, A_8,
(SEQIDNO: 3080)
RASVSFWTLLPTTGVRTRGSPLRLTLWPPR,;
CCDS8875.1, Del, A_8,
(SEQIDNO: 3081)
RESRAMISLGALREDWNQKRSLGQQIPVVI,;
CCDS3453.1, Del, A_8,
(SEQIDNO: 3082)
RNSYRMDQTFKILYLVILQTGAPGMNIKET,;
CCDS58167.1, Del, A_8,
(SEQIDNO: 3083)
RSQNHQKRKVLGTILVHNHIIDYAWVICHL,;
CCDS31426.1, Del, A_8,
(SEQIDNO: 3084)
TSQRIPCSLQKKMHLKYGLFSTFYLRTSIH,;
CCDS7450.1, Del, A_8,
(SEQIDNO: 3085)
VSVITMKLWEKHFKGLNWNLVVWILNLKMM,;
CCDS2702.1, Del, A_8,
(SEQIDNO: 3087)
IAFHIKSIAAALKRHFTVNMSKVETGLHV,;
CCDS55049.1, Ins, A_8,
(SEQIDNO: 3088)
KHPAAAAERGRVCGSSTGASAHPSGGSLV,;
CCDS11684.1, Del, A_8,
(SEQIDNO: 3089)
MFNPSYGFQASGLQHTGVDRLWWTFHYTS,;
CCDS3006.1, Del, A_8,
(SEQIDNO: 3090)
QELKEAVKFSIVKNNSNNKCGIQPGLPIL,;
CCDS31177.1, Del, A_8,
(SEQIDNO: 3091)
RIYHLNICCLRRKFYYQEANLKRRNFKLK,;
CCDS41943.1, Ins, A_8,
(SEQIDNO: 3092)
SKTESSEFSRTTNYSSFILDQPYPSFALT,;
CCDS12962.2, Del, A_8,
(SEQIDNO: 3094)
WMTMQTIIKTRSSTLERNRTEAMPREHLL,;
CCDS54746.1, Del, A_8,
(SEQIDNO: 3095)
IEALTALFTCRTASISVNISTLMSILEA,;
CCDS7434.1, Del, A_8,
(SEQIDNO: 3096)
IKRRMRMKTPPLLISVWKIFRKIKIRIV,;
CCDS8293.1, Ins, A_8,
(SEQIDNO: 3097)
KEKEEVPANRKTTGKTRRKEKSYILTNR,;
CCDS34116.1, Ins, A_8,
(SEQIDNO: 3098)
KFFFIILIFGKTSSRLLLPPGGGDRGGQ,;
CCDS5024.1, Ins, A_8,
(SEQIDNO: 3099)
KGHCCIQGCVWFKFQPIHGNQTISYHSL,;
CCDS9344.1, Del, A_8,
(SEQIDNO: 3101)
LSINNYRFQMKFYFRFTSHGSPFTSANF,;
CCDS46302.1, Del, A_8,
(SEQIDNO: 3102)
QEPQKKGNQLKFLLSRDNSMQLLEPYCC,;
CCDS44756.1, Del, A_8,
(SEQIDNO: 3103)
RDQCFQMMEGKAFLPERKCFPGNQHPLG,;
CCDS8048.1, Ins, A_8,
(SEQIDNO: 3104)
RQNKYMETRNATVTKTPFNSYNVVTCTM,;
CCDS6940.1, Del, A_8,
(SEQIDNO: 3105)
SFLVLRFMSQIILSEFWMCCGLVPTSSP,;
CCDS4035.1, Del, A_8,
(SEQIDNO: 3106)
TGTKHESGLLKTSQKLSLKKMTQGPCLG,;
CCDS33143.1, Del, A_8,
(SEQIDNO: 3108)
ALQVFSSTGLKRTLIERVSMDTAFRES,;
CCDS58143.1, Del, A_8,
(SEQIDNO: 3109)
GRISTWKPEMQQLLKHHLIVITSLLVL,;
CCDS59367.1, Del, A_8,
(SEQIDNO: 3111)
IILDTNSTNVKNVAKLLTSPQSLLPIR,;
CCDS47036.1, Ins, A_8,
(SEQIDNO: 3112)
IKNSGSFWFVESSRGQGHHTVQRPHSS,;
CCDS35139.1, Ins, A_8,
(SEQIDNO: 3113)
ISQREASNFWEAVDIICTPRTVPSAAE,;
CCDS34933.1, Del, A_8,
(SEQIDNO: 3114)
KGKNSPCCQKKLRVQNQGHLLMILLHN,;
CCDS9016.1, Del, A_8,
(SEQIDNO: 3115)
LLQKEIPLLQLSLLTDSKRNHGHPQLT,;
CCDS31448.1, Del, A_8,
(SEQIDNO: 3116)
MLKNVRGRRKKRKKKNNSKLKYRRKRK,;
CCDS32488.1, Del, A_8,
(SEQIDNO: 3117)
MLTALPPAMTAMCGYGIRGNPVQQWNI,;
CCDS53898.1, Ins, A_8,
(SEQIDNO: 3118)
MYSRGRGANGKRKGRISNKKTRVDCTD,;
CCDS786.1, Del, A_8,
(SEQIDNO: 3119)
PDNGGGSFWQEALLVLSLEQALPLWTV,;
CCDS3452.1, Del, A_8,
(SEQIDNO: 3120)
RGSGLTNGGVTERNWLPFGLFVVMYRT,;
CCDS6367.2, Del, A_8,
(SEQIDNO: 3121)
RKRNLSNMTIQTMKTVPSNFWKGALLH,;
CCDS32319.1, Del, A_8,
(SEQIDNO: 3122)
RRTKPAALSPVMVPRQKYQQRVKRSSA,;
CCDS13102.1, Del, A_8,
(SEQIDNO: 3123)
EIKVLKCLPSWKPKDLNNSPSLQWNL,;
CCDS41715.1, Ins, A_8,
(SEQIDNO: 3124)
KAEKKVTQKTEEKQKGSHRYNSRFLE,;
CCDS34565.1, Ins, A_8,
(SEQIDNO: 3125)
KCTVLIHVRLSGWIFAKKINSRCGSQ,;
CCDS33941.1, Del, A_8,
(SEQIDNO: 3126)
LVIPKLIILMEKTLTGCLRALKMNRF,;
CCDS33796.1, Del, A_8,
(SEQIDNO: 3127)
SLKRAEAKPSPHAAPICFLSHCTTEL,;
CCDS14635.1, Del, A_8,
(SEQIDNO: 3128)
ARQSLKGQAEDSSKSTLEKILNQMS,;
CCDS30948.1, Del, A_8,
(SEQIDNO: 3129)
IWWIVQNSFLLPFRMSSFPKKFFFL,;
CCDS47299.1, Ins, A_8,
(SEQIDNO: 3130)
KASGKEGEGYEEMRFFSDMSSSRAP,;
CCDS1616.1, Ins, A_8,
(SEQIDNO: 3131)
KEAQAAVPAETVGHFSQARTRAGLV,;
CCDS9933.1, Ins, A_8,
(SEQIDNO: 3132)
KGKKETCGPRRKFTICSTRKCSILR,;
CCDS54094.1, Del, A_8,
(SEQIDNO: 3133)
KKKRKMKRKKMKKKTPKKIPRKRTR,;
CCDS30603.1, Ins, A_8,
(SEQIDNO: 3134)
KSASTESNSSEKQICKAEGRLEKCL,;
CCDS45277.1, Del, A_8,
(SEQIDNO: 3135)
LTPVEKLRRKISELLLGNNMQPNSI,;
CCDS45264.1, Ins, A_8,
(SEQIDNO: 3136)
NFAYCPRCGHDPGCPEIWTLPGYGD,;
CCDS3701.2, Ins, A_8,
(SEQIDNO: 3137)
NNIPNKIRVRNGNRQWSTSKHWNEK,;
CCDS47202.1, Ins, A_8,
(SEQIDNO: 3138)
NPGAADRPRRELLLQGNSAANKDLL,;
CCDS54586.1, Del, A_8,
(SEQIDNO: 3139)
PPVKESQVARRKCLKEMARRKKTEE,;
CCDS41346.1, Del, A_8,
(SEQIDNO: 3140)
RFQMQPLSLMPAHWSICLLRDSMIW,;
CCDS43993.1, Del, A_8,
(SEQIDNO: 3141)
RKKKRKPTGRYRQSNHPLRHPDARQ,;
CCDS8293.1, Del, A_8,
(SEQIDNO: 3142)
RKRGGTSQQEDHGEDQKEGEILYTH,;
CCDS59269.1, Ins, A_8,
(SEQIDNO: 3143)
RNGNRIRLFGHHKHYKGSRGADQLI,;
CCDS10145.1, Del, A_8,
(SEQIDNO: 3144)
GKYLSPNRNLYRLLQKKKCLLIQN,;
CCDS9957.1, Del, A_8,
(SEQIDNO: 3145)
ILTMRQWLKNRSLERTHLLIIQNI,;
CCDS1279.1, Ins, A_8,
(SEQIDNO: 3146)
KARRADERKTDRRTKKARGMFILP,;
CCDS9246.1, Ins, A_8,
(SEQIDNO: 3147)
KEEKYRSRFYSKCLISIRSWIKTT,;
CCDS5142.2, Ins, A_8,
(SEQIDNO: 3148)
KEKRLSTQLFPVHSNHQQRDYKRN,;
CCDS6673.1, Ins, A_8,
(SEQIDNO: 3149)
KESSPIEPRDHNEPSISEHVCWNV,;
CCDS58144.1, Ins, A_8,
(SEQIDNO: 3150)
KGQCCEARQPQAPLPTLHPAPPAP,;
CCDS7895.1, Ins, A_8,
(SEQIDNO: 3151)
KPVYSSFHECLHNERSRCSDSYPL,;
CCDS34983.1, Ins, A_8,
(SEQIDNO: 3153)
NHANFNFGMCNYIPPCLQWNIFSI,;
CCDS1616.1, Del, A_8,
(SEQIDNO: 3154)
RGASSSTSRDSRSFFTSAHPSRPC,;
CCDS47527.1, Del, A_8,
(SEQIDNO: 3155)
RLFWMRRLWCFRQLSGDISRGQSS,;
CCDS14214.1, Del, A_8,
(SEQIDNO: 3156)
RSTLLWLLSQRRMGIMSPNRSSKD,;
CCDS3738.1, Del, A_8,
(SEQIDNO: 3157)
SGEKFFRISKKKPKKTTNLVSCMD,;
CCDS9137.1, Del, A_8,
(SEQIDNO: 3158)
SKKPPQSKRTNGMKMNMKGPEGRR,;
CCDS43278.1, Del, A_8,
(SEQIDNO: 3159)
SSIHIVEKQLKLRERPTNKKKRKN,;
CCDS54447.1, Ins, A_8,
(SEQIDNO: 3160)
TAGSFEKHDGSWRICLPSKHLRGR,;
CCDS44065.1, Ins, A_8,
(SEQIDNO: 3161)
TEDHTKREQEIQISSQSAHCDSGR,;
CCDS33353.1, Del, A_8,
(SEQIDNO: 3162)
TILKNFLSVMVKMEDYPFLVWRNF,;
CCDS5436.1, Ins, A_8,
(SEQIDNO: 3163)
TKEERYTGAAHPTFHTRCVFRTFN,;
CCDS47161.1, Del, A_8,
(SEQIDNO: 3164)
TQRRLKNWKEKKCIELNILISWRI,;
CCDS32017.1, Del, A_8,
(SEQIDNO: 3165)
TSPLLDVFSSFISSSLWVHQNACF,;
CCDS11623.1, Del, A_8,
(SEQIDNO: 3166)
FFMATGQLLFLIRLNLAAHSQCP,;
CCDS5419.1, Del, A_8,
(SEQIDNO: 3167)
FGRSLNLTVKWLVTSGKRVTSIR,;
CCDS6787.1, Del, A_8,
(SEQIDNO: 3168)
IICIKNMFLQRKGFLNLSHVEKF,;
CCDS13117.1, Ins, A_8,
(SEQIDNO: 3170)
KHCSTYYRLFSRRKTKDIRLRHL,;
CCDS55862.1, Ins, A_8,
(SEQIDNO: 3171)
KHHESFPLSCPPPHRCCLPCLLF,;
CCDS9341.1, Ins, A_8,
(SEQIDNO: 3172)
KHLKAGCRSYTGAPQCPPPSSAG,;
CCDS43027.1, Ins, A_8,
(SEQIDNO: 3174)
KYSGRAQTSKIREGRGRTLPESP,;
CCDS10180.1, Del, A_8,
(SEQIDNO: 3175)
LVCSALISLTLKGNLFTLLTLLM,;
CCDS3639.1, Del, A_8,
(SEQIDNO: 3176)
MFLIQRELLKTLNMIQVLMSVVH,;
CCDS12021.1, Del, A_8,
(SEQIDNO: 3177)
RFGMKVLPWVLTRLTNHPSWNSS,;
CCDS30729.1, Del, A_8,
(SEQIDNO: 3178)
RKTVLKNQKVSLLEISSKPRSKT,;
CCDS45114.1, Ins, A_8,
(SEQIDNO: 3179)
RLRRINGRGSQIRSRNAFNRSEE,;
CCDS2231.1, Del, A_8,
(SEQIDNO: 3180)
SPFGSSCLQTSNNNMEKVTLKKV,;
CCDS44512.1, Del, A_8,
(SEQIDNO: 3181)
STSASCSSSFSLVMTLTLDTWRL,;
CCDS54430.1, Ins, A_8,
(SEQIDNO: 3182)
TRFKQLAFRKRHFKFKDYFKSNN,;
CCDS704.1, Del, A_8,
(SEQIDNO: 3183)
YSVEKTLKKFLVEHQVEKGLENC,;
CCDS1113.2, Del, A_8,
(SEQIDNO: 3184)
EKEENLGGLKWWQEAHAGLQKG,;
CCDS11906.1, Del, A_8,
(SEQIDNO: 3185)
HGILSFLMLQKIFQLFLWHVQN,;
CCDS44948.1, Del, A_8,
(SEQIDNO: 3186)
IAQLMKDQRIIKVAPLVEDKMI,;
CCDS47757.1, Del, A_8,
(SEQIDNO: 3187)
IPSRHMFSVTKIMLKETFKRRK,;
CCDS1336.1, Del, A_8,
(SEQIDNO: 3188)
IYETKERMIKCPRSGRNSVVCF,;
CCDS43264.1, Ins, A_8,
(SEQIDNO: 3189)
KEEETAESSLRFNLPFRCYLWI,;
CCDS10010.1, Ins, A_8,
(SEQIDNO: 3190)
KGPPSTCQERLYESRSRWPCIS,;
CCDS11787.1, Ins, A_8,
(SEQIDNO: 3191)
KRLCGVLCPMVWSLQTVGSHLG,;
CCDS5049.1, Ins, A_8,
(SEQIDNO: 3192)
KRSIGKGIFYLVSATIPSRHCL,;
CCDS45016.1, Ins, A_8,
(SEQIDNO: 3193)
KSFNDGKQSVSSIPSVFLVWNR,;
CCDS4203.1, Ins, A_8,
(SEQIDNO: 3194)
KVFFWPRKAQEGLMFKEDSLSV,;
CCDS5436.1, Del, A_8,
(SEQIDNO: 3195)
QGGKIHRRCTSHLSYQVCFQNI,;
CCDS47483.1, Del, A_8,
(SEQIDNO: 3196)
QKRRLKQLQIIMKMLMVMVFMK,;
CCDS53341.1, Ins, A_8,
(SEQIDNO: 3197)
RKEKICRSSTWPIYKKNDSKNC,;
CCDS7281.1, Del, A_8,
(SEQIDNO: 3198)
RKTANYERQPREPTKMWHQSRL,;
CCDS11255.1, Del, A_8,
(SEQIDNO: 3199)
RRKIIPNCFWGKTESPSIFTTC,;
CCDS3503.1, Ins, A_8,
(SEQIDNO: 3200)
RSQTKIHRSPSVLCHLLFRTTS,;
CCDS6209.1, Ins, A_8,
(SEQIDNO: 3201)
RTNERRTEARGRDYARARRRRV,;
CCDS43336.1, Del, A_8,
(SEQIDNO: 3202)
SLTKLNKVRKKQKTDLMFKKKL,;
CCDS42794.1, Del, A_8,
(SEQIDNO: 3203)
SNCQLVTAVPNWNLFSTVLLHL,;
CCDS2874.1, Del, A_8,
(SEQIDNO: 3204)
SVSRPEACGIRTSLLVRRMRRQ,;
CCDS30978.1, Ins, A_8,
(SEQIDNO: 3205)
TSAAGSRETKKQKGYNLHQAKD,;
CCDS54419.1, Del, A_8,
(SEQIDNO: 3206)
VLTFWMMTQNKRLSKLWTMKMS,;
CCDS3108.1, Del, A_8,
(SEQIDNO: 3207)
HLNQILEQKVSTAASYWESDL,;
CCDS53450.1, Del, A_8,
(SEQIDNO: 3208)
ILKKSSTSSLIESLFPFLDPL,;
CCDS35069.1, Ins, A_8,
(SEQIDNO: 3209)
KDSQNCEDAQAIQNPQAPEAP,;
CCDS2477.1, Ins, A_8,
(SEQIDNO: 3210)
KEVQGSQCTQEASFGLFPVLL,;
CCDS8652.1, Ins, A_8,
(SEQIDNO: 3211)
KLRWHFRNPFHGQNYYQRLDL,;
CCDS9088.1, Ins, A_8,
(SEQIDNO: 3212)
KVFPRSSRRRRVIEDTIGILH,;
CCDS11512.1, Del, A_8,
(SEQIDNO: 3213)
LGERVYKYNSTVKELRLSLLF,;
CCDS34226.1, Del, A_8,
(SEQIDNO: 3214)
LQIRLCLLHFLVRLPRQRLLS,;
CCDS8680.1, Del, A_8,
(SEQIDNO: 3215)
MLLVQDGMKHSHLLFMSQNWH,;
CCDS46722.1, Del, A_8,
(SEQIDNO: 3216)
MLTQTDSAWDLEIAEVLFHIQ,;
CCDS43270.1, Del, A_8,
(SEQIDNO: 3217)
MQKKKSSREIRKRRRMMMMRR,;
CCDS7414.1, Ins, A_8,
(SEQIDNO: 3218)
NHYSERLRATDDKHRKAKSGG,;
CCDS10145.1, Ins, A_8,
(SEQIDNO: 3219)
RENIYPQTETCTDFYRRKSVS,;
CCDS7136.1, Del, A_8,
(SEQIDNO: 3220)
RLAARVWMYQNSVLQKKMKDC,;
CCDS43264.1, Del, A_8,
(SEQIDNO: 3221)
RRRNSRKQSQVQLAIQVLLVD,;
CCDS5005.1, Del, A_8,
(SEQIDNO: 3222)
TEAFAFLNMKITKQLPRQGVG,;
CCDS1917.1, Del, A_8,
(SEQIDNO: 3223)
VTWMKRRRRNLILRKPEWIFK,;
CCDS31612.1, Del, A_8,
(SEQIDNO: 3224)
GKLSPRTAVGAARNIRSSSF,;
CCDS43556.1, Ins, A_8,
(SEQIDNO: 3225)
IGSWSTCSQEPQKPHSFVGA,;
CCDS33107.1, Ins, A_8,
(SEQIDNO: 3226)
KCCCNGPRACREQNSEQGGL,;
CCDS42621.1, Ins, A_8,
(SEQIDNO: 3227)
KCCCNGPRACREQNSQQRGL,;
CCDS6463.1, Ins, A_8,
(SEQIDNO: 3228)
KEASLPGPDCSIKLYPHLPV,;
CCDS42472.1, Ins, A_8,
(SEQIDNO: 3229)
KEGAISLRLRLQGRFGRGQA,;
CCDS34195.1, Ins, A_8,
(SEQIDNO: 3230)
KGQHFYWHCGSAACHRRGCV,;
CCDS32126.1, Ins, A_8,
(SEQIDNO: 3231)
KSTATRGDWSSATTGDQPTS,;
CCDS43434.1, Del, A_8,
(SEQIDNO: 3232)
MQVRKTSLFYLDFLIGLSWK,;
CCDS4567.1, Ins, A_8,
(SEQIDNO: 3233)
NAWCWFADLFPSHPLYTTGC,;
CCDS7391.1, Del, A_8,
(SEQIDNO: 3234)
RAFIHTPRSPGCSVYANMCW,;
CCDS5142.2, Del, A_8,
(SEQIDNO: 3235)
REKIINPTISCPFQSPTKRL,;
CCDS879.1, Del, A_8,
(SEQIDNO: 3236)
REKWPLNLILIQIVQKLLIF,;
CCDS30763.2, Del, A_8,
(SEQIDNO: 3237)
RKPLLKCIKLRYKSCKKQLK,;
CCDS2217.1, Ins, A_8,
(SEQIDNO: 3238)
SCKRRKSQRTCLCRTFEEVQ,;
CCDS33182.1, Del, A_8,
(SEQIDNO: 3239)
SINIQNSQFLNVGIQKNIRE,;
CCDS11284.2, Del, A_8,
(SEQIDNO: 3240)
SRTSQSWKAGKSWKIMRRNR,;
CCDS46292.1, Del, A_8,
(SEQIDNO: 3241)
STVREALSPVQHGKCRKRRN,;
CCDS59367.1, Ins, A_8,
(SEQIDNO: 3242)
TFQMQRMWQIILHASTSSST,;
CCDS2231.1, Ins, A_8,
(SEQIDNO: 3243)
TRHLGAAVSRHQTTIWRRLH,;
CCDS30978.1, Del, A_8,
(SEQIDNO: 3244)
IGSRKQRDKKAKRIQLASS,;
CCDS13629.1, Del, A_8,
(SEQIDNO: 3245)
IKDSQKNLSQRRNLMMMGT,;
CCDS41826.1, Del, A_8,
(SEQIDNO: 3246)
IKLELPLLMMALPWVWLTF,;
CCDS45717.1, Ins, A_8,
(SEQIDNO: 3247)
KDADSYIEFGYSWKNIAHLV,;
CCDS33301.1, Ins, A_8,
(SEQIDNO: 3248)
KEACFKRLLAETCWNGNAL,;
CCDS8902.1, Ins, A_8,
(SEQIDNO: 3249)
KEGLQDCRECHQWGNIRRK,;
CCDS32308.1, Ins, A_8,
(SEQIDNO: 3250)
KEGRRSEISVFQGRKSSWE,;
CCDS56334.1, Ins, A_8,
(SEQIDNO: 3251)
KPILQKKATKRFLFYLSKL,;
CCDS3842.1, Ins, A_8,
(SEQIDNO: 3252)
KSCNNFISFRNTRWPAAGL,;
CCDS54647.1, Del, A_8,
(SEQIDNO: 3253)
KSSGLACLPILLRNVRIWR,;
CCDS41745.1, Ins, A_8,
(SEQIDNO: 3254)
KYARGRDSLELLPKELEVI,;
CCDS12963.1, Del, A_8,
(SEQIDNO: 3255)
LGKSLHFVIIREFTKERAY,;
CCDS42033.1, Del, A_8,
(SEQIDNO: 3256)
LNVTCFVIFRRVRNELQKW,;
CCDS7179.1, Del, A_8,
(SEQIDNO: 3257)
MTWQICTSYSVLCPLVYLI,;
CCDS2304.1, Ins, A_8,
(SEQIDNO: 3258)
RLHGSHNTKQTKVPQCTDS,;
CCDS44547.1, Del, A_8,
(SEQIDNO: 3259)
RSIFRGHRSWDLPIIVNLS,;
CCDS41715.1, Del, A_8,
(SEQIDNO: 3260)
SRKKGHTKNRRKAKRKPQI,;
CCDS47917.1, Del, A_8,
(SEQIDNO: 3261)
SWCLCCRLIAMKEMTWTKI,;
CCDS56334.1, Del, A_8,
(SEQIDNO: 3262)
AYPSEKSNKKISVLSFET,;
CCDS8740.1, Del, A_8,
(SEQIDNO: 3263)
GNPVQESPQHQMIQDAQG,;
CCDS30576.1, Ins, A_8,
(SEQIDNO: 3264)
IPAEPTGCCAHPKVLPKL,;
CCDS58104.1, Del, A_8,
(SEQIDNO: 3265)
IQASTSPSSQHGCMRDLP,;
CCDS6467.1, Ins, A_8,
(SEQIDNO: 3267)
KCHCYRELYLSNREDFEV,;
CCDS7136.1, Ins, A_8,
(SEQIDNO: 3268)
KDWQQECGCIKTRCFRKK,;
CCDS32174.1, Ins, A_8,
(SEQIDNO: 3269)
KGPPSTCQERLYESSGSW,;
CCDS1521.1, Ins, A_8,
(SEQIDNO: 3270)
KQWEDPTSPANVIALLQT,;
CCDS11459.2, Ins, A_8,
(SEQIDNO: 3271)
KVQPNASQAQQKPTTHGR,;
CCDS55123.1, Ins, A_8,
(SEQIDNO: 3273)
MLFRTENSLWRESASFNL,;
CCDS239.2, Del, A_8,
(SEQIDNO: 3274)
MTLKALVKTWTQFRNYPR,;
CCDS42277.1, Ins, A_8,
(SEQIDNO: 3275)
NSRICDLSAIPKQWNYQP,;
CCDS34218.1, Ins, A_8,
(SEQIDNO: 3276)
NWMWQFWRITIREKFIHK,;
CCDS6274.1, Del, A_8,
(SEQIDNO: 3277)
RKRRSKVKITLLHRTQKN,;
CCDS7944.1, Del, A_8,
(SEQIDNO: 3278)
RSHFRLGNSEMSSIRKKI,;
CCDS32234.1, Del, A_8,
(SEQIDNO: 3279)
YRKLYQKQLEKRIKHLCS,;
CCDS13177.1, Del, A_8,
(SEQIDNO: 3280)
AGTDQGTAGNNAKMEKQ,;
CCDS31668.1, Del, A_8,
(SEQIDNO: 3281)
IIVVENYIGIISCQMEL,;
CCDS3189.1, Ins, A_8,
(SEQIDNO: 3282)
IWQDSRNIWKIGGLRSH,;
CCDS621.1, Ins, A_8,
(SEQIDNO: 3283)
KCRSYWTSWRTKEQSRL,;
CCDS3503.1, Del, A_8,
(SEQIDNO: 3284)
KPNKNTQITFSLMSFTL,;
CCDS1202.1, Ins, A_8,
(SEQIDNO: 3285)
KPVPWCGGIGCERNNWG,;
CCDS13704.1, Ins, A_8,
(SEQIDNO: 3286)
KQNQHPSPNLYCGQNKK,;
CCDS10131.1, Ins, A_8,
(SEQIDNO: 3287)
NEERTKNSPLSSYGNNL,;
CCDS6184.1, Ins, A_8,
(SEQIDNO: 3288)
NLGSIKGISDGENRTWL,;
CCDS58128.1, Ins, A_8,
(SEQIDNO: 3289)
NPSPAEGASLWEEGFII,;
CCDS44708.1, Ins, A_8,
(SEQIDNO: 3290)
NSTDWGWHCSSIMPCNF,;
CCDS3754.1, Del, A_8,
(SEQIDNO: 3291)
RLVRGRRLRTAENVKNN,;
CCDS42031.1, Ins, A_8,
(SEQIDNO: 3292)
RQGEKRDQKGEERAQEG,;
CCDS2194.1, Del, A_8,
(SEQIDNO: 3293)
RQTLRTLSLRGMVPRTL,;
CCDS47443.1, Ins, A_8,
(SEQIDNO: 3294)
RSCNFLSRTVGCFPSSC,;
CCDS13651.1, Ins, A_8,
(SEQIDNO: 3295)
RSKKVSTRKNGGGLKRK,;
CCDS2191.1, Ins, A_8,
(SEQIDNO: 3296)
SCRECHQTKETLASKED,;
CCDS1404.1, Del, A_8,
(SEQIDNO: 3297)
SDQNLFTEIILNPPKHQ,;
CCDS10374.2, Ins, A_8,
(SEQIDNO: 3298)
SKSQKTCPQKNSAQTSC,;
CCDS13117.1, Del, A_8,
(SEQIDNO: 3299)
TLFNILQTLLSKKNKGH,;
CCDS59367.1, Del, A_8,
(SEQIDNO: 3300)
FSNAKNVANHFACFHI,;
CCDS34472.1, Del, A_8,
(SEQIDNO: 3301)
IPWMNLEPRLLNCCAL,;
CCDS3627.1, Del, A_8,
(SEQIDNO: 3302)
IPWMTFQRVCGKEEAS,;
CCDS41623.1, Ins, A_8,
(SEQIDNO: 3303)
ITTRNSSIRASWRIEV,;
CCDS2518.1, Ins, A_8,
(SEQIDNO: 3304)
KAPPLRPRLRLRGRLR,;
CCDS12904.1, Ins, A_8,
(SEQIDNO: 3305)
KCCGNGPRVCRKQNSE,;
CCDS43270.1, Ins, A_8,
(SEQIDNO: 3306)
KCRKRKAAEKSEKEEG,;
CCDS44547.1, Ins, A_8,
(SEQIDNO: 3307)
KEAYSAATAAGISQLL,;
CCDS47535.1, Ins, A_8,
(SEQIDNO: 3308)
KEEEKEETFKKIRGLC,;
CCDS3645.1, Ins, A_8,
(SEQIDNO: 3309)
KEIFTYEINHPGSWHI,;
CCDS1146.1, Ins, A_8,
(SEQIDNO: 3310)
KEKEKEAERGGRSYSI,;
CCDS4235.1, Ins, A_8,
(SEQIDNO: 3311)
KGRTTAGSEQQDLEHR,;
CCDS3587.1, Ins, A_8,
(SEQIDNO: 3313)
KTSSKAYRYKLLQLGR,;
CCDS2874.1, Ins, A_8,
(SEQIDNO: 3314)
KVCQGRKPVGSEHHCL,;
CCDS34480.1, Del, A_8,
(SEQIDNO: 3315)
LGNMMFLKPMVKFRIC,;
CCDS58214.1, Del, A_8,
(SEQIDNO: 3316)
LKTFHMKCFLNLSQME,;
CCDS55599.1, Del, A_8,
(SEQIDNO: 3317)
LLKNSNCRACFCCGQS,;
CCDS6827.1, Del, A_8,
(SEQIDNO: 3318)
LWLIVLTQLVLNLVQE,;
CCDS643.1, Del, A_8,
(SEQIDNO: 3319)
MPERLPNLKLGDMYFL,;
CCDS3457.1, Del, A_8,
(SEQIDNO: 3320)
MSPPFMPSRVLFMSRR,;
CCDS44185.1, Ins, A_8,
(SEQIDNO: 3321)
NIFSNLLWKYTWNGDL,;
CCDS5622.1, Del, A_8,
(SEQIDNO: 3322)
REKRQAVNMMCQHTMI,;
CCDS34679.1, Del, A_8,
(SEQIDNO: 3323)
RERKFYWKRNFKATVK,;
CCDS43379.1, Del, A_8,
(SEQIDNO: 3324)
RESTLGNFWMKLLQLP,;
CCDS58166.1, Del, A_8,
(SEQIDNO: 3325)
RSQNHQKSPQALAMPW,;
CCDS1414.2, Del, A_8,
(SEQIDNO: 3326)
RVGSMSFEVPSTKRSV,;
CCDS33237.1, Del, A_8,
(SEQIDNO: 3327)
SSHMHNTSPCQMMSHL,;
CCDS5091.2, Del, A_8,
(SEQIDNO: 3328)
FRRDFRKFSNRMISL,;
CCDS12495.1, Del, A_8,
(SEQIDNO: 3329)
IHAMNVGNLSAGNQY,;
CCDS14214.1, Ins, A_8,
(SEQIDNO: 3330)
IKEGAPRSPRKTEKG,;
CCDS44153.1, Ins, A_8,
(SEQIDNO: 3331)
KAQGTDEFQELCRRT,;
CCDS31590.1, Ins, A_8,
(SEQIDNO: 3332)
KEHPCHSGPYSQLPG,;
CCDS34679.1, Ins, A_8,
(SEQIDNO: 3333)
KEKESFIGNETSRQQ,;
CCDS8302.1, Ins, A_8,
(SEQIDNO: 3334)
KESHDCGGVSPFGKQ,;
CCDS41329.1, Ins, A_8,
(SEQIDNO: 3335)
KFVMLFTWFSDSRRR,;
CCDS31426.1, Ins, A_8,
(SEQIDNO: 3336)
KPHKESPAHYRRRCI,;
CCDS47630.1, Ins, A_8,
(SEQIDNO: 3337)
KVNSCISSDYSYTSV,;
CCDS30948.1, Ins, A_8,
(SEQIDNO: 3338)
KYGGSFKTPSYFPSE,;
CCDS9300.2, Del, A_8,
(SEQIDNO: 3339)
LKPYRSVLVLIKMFF,;
CCDS2217.1, Del, A_8,
(SEQIDNO: 3340)
LQKKEIAKNVFVQNI,;
CCDS3212.2, Ins, A_8,
(SEQIDNO: 3342)
NRSYLCNESCEKRAC,;
CCDS5000.2, Ins, A_8,
(SEQIDNO: 3343)
REYFLGLSWPSPEES,;
CCDS58956.1, Del, A_8,
(SEQIDNO: 3344)
RMILHFWKKKNAVIT,;
CCDS4678.1, Del, A_8,
(SEQIDNO: 3345)
RPENSQINSSLCNEA,;
CCDS8902.1, Del, A_8,
(SEQIDNO: 3346)
RRPPRLQRMPPVGKH,;
CCDS14008.1, Del, A_8,
(SEQIDNO: 3347)
RSVKRCKRSLPKGIV,;
CCDS54103.1, Del, A_8,
(SEQIDNO: 3348)
SLGIIWPKSGLILTA,;
CCDS31612.1, Ins, A_8,
(SEQIDNO: 3349)
TESSAPGQPWGQQEI,;
CCDS43119.1, Ins, A_8,
(SEQIDNO: 3350)
TKSTRKQEQRFRKRD,;
CCDS54426.1, Del, A_8,
(SEQIDNO: 3351)
TQLLLFIRQMYRIMV,;
CCDS3998.1, Del, A_8,
(SEQIDNO: 3352)
TWRKLADSLVCSWIT,;
CCDS6354.1, Del, A_8,
(SEQIDNO: 3354)
CWSQILTALWRGRV,;
CCDS31774.1, Del, A_8,
(SEQIDNO: 3355)
GNFQRTTCHSILSS,;
CCDS33960.1, Del, A_8,
(SEQIDNO: 3356)
IICIHIELLFLPLP,;
CCDS47846.1, Ins, A_8,
(SEQIDNO: 3357)
ISETSLWQWQIGGK,;
CCDS43434.1, Ins, A_8,
(SEQIDNO: 3358)
KCKFGRLLYSTWIF,;
CCDS43744.1, Ins, A_8,
(SEQIDNO: 3359)
KCNYGIIRNEKTAS,;
CCDS1584.1, Ins, A_8,
(SEQIDNO: 3360)
KDVCIEAYTSYSVS,;
CCDS5388.1, Ins, A_8,
(SEQIDNO: 3361)
KEKDDVSHNQKCRI,;
CCDS32146.1, Ins, A_8,
(SEQIDNO: 3362)
KENLWSCHPQKEVY,;
CCDS58104.1, Ins, A_8,
(SEQIDNO: 3363)
KFRPAPPHLPSMGV,;
CCDS6538.1, Ins, A_8,
(SEQIDNO: 3364)
KFWSKLWDSKETRL,;
CCDS45016.1, Ins, A_8,
(SEQIDNO: 3365)
KGSQEKGCIRIPVS,;
CCDS42281.1, Ins, A_8,
(SEQIDNO: 3366)
KHTWKCITDIRLLK,;
CCDS2889.1, Ins, A_8,
(SEQIDNO: 3367)
KKDFSSKEVKTICS,;
CCDS4528.1, Del, A_8,
(SEQIDNO: 3368)
KMPRGLKDGGWSER,;
CCDS33191.1, Ins, A_8,
(SEQIDNO: 3369)
KNRIKMYKLLFNYV,;
CCDS34865.1, Ins, A_8,
(SEQIDNO: 3370)
KQEPPCTRLHGNIL,;
CCDS5787.1, Ins, A_8,
(SEQIDNO: 3371)
KSPTNYKYNIHTDD,;
CCDS44512.1, Ins, A_8,
(SEQIDNO: 3372)
KVRLQVALHLSPWS,;
CCDS34498.1, Ins, A_8,
(SEQIDNO: 3373)
KYRVNSTIGTSSTV,;
CCDS44708.1, Del, A_8,
(SEQIDNO: 3375)
LNRLGLALLQHHAL,;
CCDS11885.1, Del, A_8,
(SEQIDNO: 3376)
MIRKIQKRRRTANR,;
CCDS10558.1, Del, A_8,
(SEQIDNO: 3377)
MKMACGKRSLLQEV,;
CCDS12392.1, Ins, A_8,
(SEQIDNO: 3378)
NTHRESYYSQNSGH,;
CCDS47945.1, Del, A_8,
(SEQIDNO: 3379)
QIQFVTLGKSSVQT,;
CCDS41346.1, Del, A_8,
(SEQIDNO: 3380)
QQLKWTPHILKSAS,;
CCDS33506.1, Ins, A_8,
(SEQIDNO: 3381)
RDHSEEGSGGPCAE,;
CCDS4306.1, Ins, A_8,
(SEQIDNO: 3382)
RKEEESKKGLNQRF,;
CCDS34606.1, Del, A_8,
(SEQIDNO: 3383)
RKENTVKRPNLPHL,;
CCDS54605.1, Ins, A_8,
(SEQIDNO: 3384)
RKLYAHKTRNRKFK,;
CCDS10131.1, Del, A_8,
(SEQIDNO: 3385)
RRKNKKQPTFFLWQ,;
CCDS4203.1, Del, A_8,
(SEQIDNO: 3386)
SIFLAKESSGRAYV,;
CCDS33770.2, Ins, A_8,
(SEQIDNO: 3387)
SKEADGIASFGRKK,;
CCDS3411.2, Ins, A_8,
(SEQIDNO: 3388)
SSLKQKEKKRFKEC,;
CCDS14682.1, Ins, A_8,
(SEQIDNO: 3389)
TFRYKGKQHPFFST,;
CCDS13704.1, Del, A_8,
(SEQIDNO: 3390)
TKPTSFPEPLLWTK,;
CCDS3673.1, Del, A_8,
(SEQIDNO: 3391)
TKSGKKQELTFLLL,;
CCDS6848.2, Del, A_8,
(SEQIDNO: 3392)
TVLSLVTISRFVLS,;
CCDS4244.1, Del, A_8,
(SEQIDNO: 3393)
CICSSIGRPGICC,;
CCDS32528.1, Del, A_8,
(SEQIDNO: 3394)
GHLLLDYKRRLWN,;
CCDS110.1, Del, A_8,
(SEQIDNO: 3395)
HQRCAASQQSASF,;
CCDS761.1, Ins, A_8,
(SEQIDNO: 3396)
IAWSPWHENFRSR,;
CCDS33814.1, Ins, A_8,
(SEQIDNO: 3397)
IKGGKGGNVPAKF,;
CCDS33894.1, Del, A_8,
(SEQIDNO: 3398)
IPSLNAQWMFLRI,;
CCDS34901.1, Ins, A_8,
(SEQIDNO: 3399)
ISFGCESTLRSSH,;
CCDS6018.1, Ins, A_8,
(SEQIDNO: 3401)
KAGKRRRGNKSQR,;
CCDS3457.1, Ins, A_8,
(SEQIDNO: 3402)
KCRHLLCPAGYSS,;
CCDS2234.1, Ins, A_8,
(SEQIDNO: 3403)
KGGSARQCGSCYT,;
CCDS54426.1, Ins, A_8,
(SEQIDNO: 3404)
KLSFCCLSGRCTG,;
CCDS813.1, Ins, A_8,
(SEQIDNO: 3405)
KQGPGRSHPGTVH,;
CCDS6149.1, Ins, A_8,
(SEQIDNO: 3406)
KSNPGQVCTPNFL,;
CCDS58398.1, Ins, A_8,
(SEQIDNO: 3407)
KSWSEPVPKCAIQ,;
CCDS3189.1, Del, A_8,
(SEQIDNO: 3408)
LAGFQEYMEDWGT,;
CCDS33909.1, Del, A_8,
(SEQIDNO: 3409)
MKSIWRANSSQSK,;
CCDS13482.1, Ins, A_8,
(SEQIDNO: 3410)
NKFSGTYTRNTKQ,;
CCDS30715.1, Ins, A_8,
(SEQIDNO: 3411)
NSKLLYFCGQSEY,;
CCDS9435.1, Del, A_8,
(SEQIDNO: 3412)
RCSLMEQIPHLKS,;
CCDS13651.1, Ins, A_8,
(SEQIDNO: 3413)
RNPRKTKITEEEN,;
CCDS43525.1, Del, A_8,
(SEQIDNO: 3414)
RRSKIEASPIGSI,;
CCDS7484.1, Del, A_8,
(SEQIDNO: 3415)
RSLGPKKMFQNPG,;
CCDS53456.1, Del, A_8,
(SEQIDNO: 3416)
RVGFEVPSTKRSV,;
CCDS46451.1, Del, A_8,
(SEQIDNO: 3417)
SGSQSGTKMKATH,;
CCDS46613.1, Del, A_8,
(SEQIDNO: 3418)
SPSLQTQWRLKRS,;
CCDS9137.1, Ins, A_8,
(SEQIDNO: 3419)
TARSHRRAREQTV,;
CCDS8937.2, Ins, A_8,
(SEQIDNO: 3420)
TGGRICKQKQVYI,;
CCDS7146.1, Del, A_8,
(SEQIDNO: 3421)
TLIGTCPKSLLCH,;
CCDS5048.1, Del, A_8,
(SEQIDNO: 3422)
TLNWKRGPSVVPW,;
CCDS55858.1, Del, A_8,
(SEQIDNO: 3423)
TMSLSNILMKFRL,;
CCDS6082.1, Del, A_8,
(SEQIDNO: 3424)
WKQLHSSGNVLNG,;
CCDS41623.1, Del, A_8,
(SEQIDNO: 3425)
YNKEFLHQGQLEN,;
CCDS14469.1, Del, A_8,
(SEQIDNO: 3426)
GLNKMNSGWSLK,;
CCDS3740.1, Ins, A_8,
(SEQIDNO: 3427)
IGGLSPGHRGRN,;
CCDS7283.1, Ins, A_8,
(SEQIDNO: 3428)
IKASIIFRYFYS,;
CCDS5091.2, Ins, A_8,
(SEQIDNO: 3429)
ISEETSGNSQTE,;
CCDS5787.1, Del, A_8,
(SEQIDNO: 3430)
ISNKLQIQHPHR,;
CCDS7142.1, Del, A_8,
(SEQIDNO: 3431)
IVIILVLDLDLP,;
CCDS33237.1, Ins, A_8,
(SEQIDNO: 3432)
KAAICTTPALVK,;
CCDS55244.1, Ins, A_8,
(SEQIDNO: 3433)
KCCRSNAVTTWL,;
CCDS3719.1, Ins, A_8,
(SEQIDNO: 3434)
KCFVCSLLLHSK,;
CCDS9393.1, Ins, A_8,
(SEQIDNO: 3436)
KEKKGTSFSLFL,;
CCDS58166.1, Ins, A_8,
(SEQIDNO: 3437)
KEVKTTRKVHKP,;
CCDS8929.1, Ins, A_8,
(SEQIDNO: 3438)
KGESLLGGDCAV,;
CCDS13416.1, Ins, A_8,
(SEQIDNO: 3439)
KGGDDSRGKVSV,;
CCDS54426.1, Ins, A_8,
(SEQIDNO: 3440)
KGVPKDRDCEGS,;
CCDS3504.1, Del, A_8,
(SEQIDNO: 3441)
KLINLNLFMKHY,;
CCDS32123.1, Ins, A_8,
(SEQIDNO: 3442)
KLQNEYKLWARE,;
CCDS47028.1, Del, A_8,
(SEQIDNO: 3444)
LIWQVFLKMILG,;
CCDS54773.1, Del, A_8,
(SEQIDNO: 3445)
LPRNLFQMSTSF,;
CCDS2191.1, Del, A_8,
(SEQIDNO: 3446)
LQRMSSDKRNTG,;
CCDS8740.1, Ins, A_8,
(SEQIDNO: 3447)
METQFRSPLNIR,;
CCDS2237.1, Del, A_8,
(SEQIDNO: 3448)
MKKENKIKWKLN,;
CCDS41355.1, Ins, A_8,
(SEQIDNO: 3449)
NRSNKVFRRYLW,;
CCDS44989.1, Ins, A_8,
(SEQIDNO: 3450)
NSLLPAATEDLK,;
CCDS58480.1, Del, A_8,
(SEQIDNO: 3451)
PPLRFNLILMMY,;
CCDS8740.1, Del, A_8,
(SEQIDNO: 3453)
RKLLNQKKKLRK,;
CCDS11592.1, Del, A_8,
(SEQIDNO: 3454)
RLRIPSLRKYRQ,;
CCDS44770.1, Del, A_8,
(SEQIDNO: 3455)
RLRKKRKRRRRK,;
CCDS879.1, Ins, A_8,
(SEQIDNO: 3456)
RQENTNIFIGNT,;
CCDS34933.1, Ins, A_8,
(SEQIDNO: 3457)
RRGRTARAARRN,;
CCDS6367.2, Ins, A_8,
(SEQIDNO: 3458)
SEIGRQKLNSIW,;
CCDS9088.1, Del, A_8,
(SEQIDNO: 3459)
SISKIFSTKKSH,;
CCDS55053.1, Del, A_8,
(SEQIDNO: 3460)
SREKLLKPNKGL,;
CCDS3982.2, Ins, A_8,
(SEQIDNO: 3461)
SRKCSKTSRKKK,;
CCDS6184.1, Del, A_8,
(SEQIDNO: 3462)
SRKHQRHFRWRK,;
CCDS31654.1, Ins, A_8,
(SEQIDNO: 3463)
SSGVPSEAGYSI,;
CCDS45847.1, Ins, A_8,
(SEQIDNO: 3464)
SVTFTIGIICLF,;
CCDS11512.1, Ins, A_8,
(SEQIDNO: 3465)
SWEKEFTSTTAQ,;
CCDS2924.1, Del, A_8,
(SEQIDNO: 3466)
TKKWRKTVMAAT,;
CCDS47867.1, Del, A_8,
(SEQIDNO: 3467)
TLVMVATVKLFL,;
CCDS1765.1, Del, A_8,
(SEQIDNO: 3468)
TTGLVNFQLVSF,;
CCDS34948.1, Del, A_8,
(SEQIDNO: 3469)
FLFHNVVLLEE,;
CCDS6082.1, Ins, A_8,
(SEQIDNO: 3470)
IGNNCTAAEMS,;
CCDS13458.1, Del, A_8,
(SEQIDNO: 3471)
ITFSCVMQPKS,;
CCDS9016.1, Ins, A_8,
(SEQIDNO: 3472)
IYSRKKSHYSS,;
CCDS31309.1, Ins, A_8,
(SEQIDNO: 3473)
KAEAKEVLCLL,;
CCDS32319.1, Ins, A_8,
(SEQIDNO: 3474)
KEEQNQPLSAR,;
CCDS42721.1, Ins, A_8,
(SEQIDNO: 3475)
KERTEGQKTEF,;
CCDS58167.1, Ins, A_8,
(SEQIDNO: 3476)
KEVKTTRKEKF,;
CCDS46032.1, Ins, A_8,
(SEQIDNO: 3477)
KLFPKSDTEKI,;
CCDS46031.1, Ins, A_8,
(SEQIDNO: 3478)
KLFPKSDTENI,;
CCDS9684.1, Ins, A_8,
(SEQIDNO: 3479)
KSGSSATGMDD,;
CCDS7632.1, Ins, A_8,
(SEQIDNO: 3480)
KSKIGVLHTCL,;
CCDS44730.1, Ins, A_8,
(SEQIDNO: 3481)
KSVNSDGHEMH,;
CCDS31879.1, Del, A_8,
(SEQIDNO: 3482)
LINPDKKIKMI,;
CCDS9340.1, Del, A_8,
(SEQIDNO: 3483)
LTSLQKLKSPK,;
CCDS35419.1, Del, A_8,
(SEQIDNO: 3485)
MMRCRRHRTGS,;
CCDS7659.1, Del, A_8,
(SEQIDNO: 3486)
MNLPFGSFMSQ,;
CCDS6467.1, Del, A_8,
(SEQIDNO: 3487)
MSLLQRTVSQQ,;
CCDS5147.1, Del, A_8,
(SEQIDNO: 3488)
MWRRSIGSGSQ,;
CCDS56026.1, Ins, A_8,
(SEQIDNO: 3489)
NEGLSTEKTAE,;
CCDS2045.1, Ins, A_8,
(SEQIDNO: 3490)
NENRQVCTCCN,;
CCDS41943.1, Del, A_8,
(SEQIDNO: 3491)
QDRIFRVFQNH,;
CCDS10010.1, Del, A_8,
(SEQIDNO: 3492)
RASFDLPGKAL,;
CCDS5000.2, Del, A_8,
(SEQIDNO: 3493)
RILLGTFLAIP,;
CCDS41630.1, Ins, A_8,
(SEQIDNO: 3494)
RRLIYRGNNYR,;
CCDS32270.1, Del, A_8,
(SEQIDNO: 3495)
RRNLQRNLKVL,;
CCDS6463.1, Del, A_8,
(SEQIDNO: 3496)
RSQPSWSRLFH,;
CCDS34925.1, Del, A_8,
(SEQIDNO: 3497)
SFSKQWQNFTF,;
CCDS95.1, Del, A_8,
(SEQIDNO: 3498)
SLVMKGQIPVR,;
CCDS3740.1, Ins, A_8,
(SEQIDNO: 3499)
SSGRRTRKDLP,;
CCDS11623.1, Ins, A_8,
(SEQIDNO: 3500)
SSLWLLVSFYS,;
CCDS9911.2, Del, A_8,
(SEQIDNO: 3501)
SYALSNKNLLI,;
CCDS10112.1, Del, A_8,
(SEQIDNO: 3502)
SYMKHTLGLNF,;
CCDS1404.1, Ins, A_8,
(SEQIDNO: 3503)
TATKIYSQRSY,;
CCDS45002.1, Ins, A_8,
(SEQIDNO: 3505)
TEAKAPEVNTS,;
CCDS32973.1, Ins, A_8,
(SEQIDNO: 3506)
TFQMHRMWQSF,;
CCDS47639.1, Del, A_8,
(SEQIDNO: 3507)
THPCTMLLPQG,;
CCDS5049.1, Del, A_8,
(SEQIDNO: 3508)
TLNWKRNLLFG,;
CCDS11928.1, Del, A_8,
(SEQIDNO: 3509)
YLEIILFHSMR,;
CCDS5987.2, Del, A_8,
(SEQIDNO: 3510)
YMMKKLLNSHT,;
CCDS32306.1, Del, A_8,
(SEQIDNO: 3511)
ASSPGHPLGP,;
CCDS7434.1, Del, A_8,
(SEQIDNO: 3512)
EVTRCCFFHK,;
CCDS44989.1, Del, A_8,
(SEQIDNO: 3513)
FFTTCGNRRS,;
CCDS30715.1, Del, A_8,
(SEQIDNO: 3514)
FQAPLLLWTK,;
CCDS34061.1, Del, A_8,
(SEQIDNO: 3515)
IAMTMDQYPF,;
CCDS34721.1, Del, A_8,
(SEQIDNO: 3516)
IEITPQRSKA,;
CCDS55858.1, Del, A_8,
(SEQIDNO: 3517)
IKALLTLNSL,;
CCDS33179.1, Ins, A_8,
(SEQIDNO: 3518)
IKGNISKSST,;
CCDS46302.1, Ins, A_8,
(SEQIDNO: 3519)
IRSHRRKETS,;
CCDS1838.1, Ins, A_8,
(SEQIDNO: 3520)
ISDFKAPILL,;
CCDS31209.1, Ins, A_8,
(SEQIDNO: 3521)
KANSHCEHHL,;
CCDS46613.1, Ins, A_8,
(SEQIDNO: 3522)
KAQAYKPSGD,;
CCDS6551.2, Ins, A_8,
(SEQIDNO: 3523)
KARRVSTIVL,;
CCDS6948.1, Ins, A_8,
(SEQIDNO: 3525)
KEEKVQSPGI,;
CCDS41941.1, Ins, A_8,
(SEQIDNO: 3526)
KEETTQDSNK,;
CCDS46348.1, Ins, A_8,
(SEQIDNO: 3527)
KFCHIIYSVS,;
CCDS4035.1, Ins, A_8,
(SEQIDNO: 3528)
KLGQSTRAVY,;
CCDS33143.1, Ins, A_8,
(SEQIDNO: 3529)
KPFKFSVQLD,;
CCDS13651.1, Ins, A_8,
(SEQIDNO: 3530)
KQISRSSQSL,;
CCDS55045.1, Ins, A_8,
(SEQIDNO: 3531)
KRSIGKESQD,;
CCDS5048.1, Ins, A_8,
(SEQIDNO: 3532)
KRSIGKEVLL,;
CCDS34218.1, Del, A_8,
(SEQIDNO: 3533)
LDVAILENYD,;
CCDS30745.1, Del, A_8,
(SEQIDNO: 3534)
LGNHWILLVS,;
CCDS45842.1, Del, A_8,
(SEQIDNO: 3535)
LLPSFKMKEL,;
CCDS42801.1, Del, A_8,
(SEQIDNO: 3536)
LWTIRNYLLH,;
CCDS11870.2, Ins, A_8,
(SEQIDNO: 3537)
MGNSFSKENP,;
CCDS11928.1, Ins, A_8,
(SEQIDNO: 3538)
NIWRSSYSTV,;
CCDS34022.1, Ins, A_8,
(SEQIDNO: 3539)
NLGQSEDCKI,;
CCDS33197.2, Ins, A_8,
(SEQIDNO: 3540)
NLIQFPKDSP,;
CCDS55858.1, Ins, A_8,
(SEQIDNO: 3541)
NNYAGNEGIK,;
CCDS46919.1, Ins, A_8,
(SEQIDNO: 3542)
NPAKTRIWHC,;
CCDS9344.1, Ins, A_8,
(SEQIDNO: 3543)
NSVSTTTGFR,;
CCDS41623.1, Del, A_8,
(SEQIDNO: 3544)
NSWSQIAGRH,;
CCDS9344.1, Ins, A_8,
(SEQIDNO: 3545)
NTERPKIRTN,;
CCDS11319.1, Ins, A_8,
(SEQIDNO: 3546)
NYKRPWINQP,;
CCDS31023.1, Del, A_8,
(SEQIDNO: 3547)
PRHWISCLKK,;
CCDS13433.1, Del, A_8,
(SEQIDNO: 3548)
RLPCKVTESS,;
CCDS53936.1, Ins, A_8,
(SEQIDNO: 3549)
RNTNTPGSAS,;
CCDS7414.1, Del, A_8,
(SEQIDNO: 3550)
SLFRETQSNR,;
CCDS3920.1, Del, A_8,
(SEQIDNO: 3551)
SLILSFQRVK,;
CCDS3740.1, Ins, A_8,
(SEQIDNO: 3552)
SQSKDQYNGT,;
CCDS31309.1, Del, A_8,
(SEQIDNO: 3553)
SRGQRSLVSA,;
CCDS1202.1, Del, A_8,
(SEQIDNO: 3554)
TCPLVRWNRM,;
CCDS4041.1, Ins, A_8,
(SEQIDNO: 3555)
TSYRHENACF,;
CCDS56156.1, Del, A_8,
(SEQIDNO: 3556)
TTSQSQLSSE,;
CCDS45820.1, Del, A_8,
(SEQIDNO: 3557)
VPLTKLSEVF,;
CCDS58899.1, Del, A_8,
(SEQIDNO: 3558)
CKPRFHFLP,;
CCDS6149.1, Del, A_8,
(SEQIDNO: 3559)
IESWTSLHP,;
CCDS34948.1, Ins, A_8,
(SEQIDNO: 3560)
IFFSTMWFS,;
CCDS761.1, Del, A_8,
(SEQIDNO: 3561)
IFSLIMKSQ,;
CCDS42411.1, Ins, A_8,
(SEQIDNO: 3562)
IKIGKKHQR,;
CCDS41329.1, Del, A_8,
(SEQIDNO: 3563)
IRHAFYLVL,;
CCDS42721.1, Del, A_8,
(SEQIDNO: 3564)
IRKTSQVLT,;
CCDS3189.1, Ins, A_8,
(SEQIDNO: 3566)
KAEIARRKR,;
CCDS41346.1, Ins, A_8,
(SEQIDNO: 3567)
KDSRCNPSP,;
CCDS58.1, Ins, A_8,
(SEQIDNO: 3568)
KEASSEVHS,;
CCDS35069.1, Ins, A_8,
(SEQIDNO: 3569)
KECQEEADS,;
CCDS6948.1, Ins, A_8,
(SEQIDNO: 3570)
KEKVQSPGI,;
CCDS2881.1, Ins, A_8,
(SEQIDNO: 3572)
KFQHKSAGI,;
CCDS1113.2, Ins, A_8,
(SEQIDNO: 3573)
KKRKKTSVD,;
CCDS3673.1, Ins, A_8,
(SEQIDNO: 3575)
KPNLERSKS,;
CCDS32062.1, Ins, A_8,
(SEQIDNO: 3576)
KYDRKFLFV,;
CCDS34233.1, Ins, A_8,
(SEQIDNO: 3577)
KYKQQNSTG,;
CCDS47757.1, Ins, A_8,
(SEQIDNO: 3578)
KYQAGICSV,;
CCDS45264.1, Del, A_8,
(SEQIDNO: 3579)
LCLLSEMWP,;
CCDS54564.1, Del, A_8,
(SEQIDNO: 3580)
LRLAVLVNN,;
CCDS3719.1, Del, A_8,
(SEQIDNO: 3581)
MFCLQFVIA,;
CCDS34681.1, Del, A_8,
(SEQIDNO: 3582)
MKSKTSCVV,;
CCDS7588.1, Del, A_8,
(SEQIDNO: 3583)
QHLLEVNPY,;
CCDS2482.1, Del, A_8,
(SEQIDNO: 3584)
QLTRDWKAS,;
CCDS8354.1, Del, A_8,
(SEQIDNO: 3585)
RGTKSMKVT,;
CCDS9933.1, Del, A_8,
(SEQIDNO: 3586)
RKKGNMWTT,;
CCDS30860.1, Ins, A_8,
(SEQIDNO: 3587)
RKKRIFTYS,;
CCDS1685.1, Del, A_8,
(SEQIDNO: 3588)
SKIKSPFTH,;
CCDS43267.1, Del, A_8,
(SEQIDNO: 3589)
SLITQMMKH,;
CCDS42721.1, Del, A_8,
(SEQIDNO: 3590)
SRTLMKMIS,;
CCDS7736.1, Del, A_8,
(SEQIDNO: 3591)
SSSWTKTMG,;
CCDS47299.1, Del, A_8,
(SEQIDNO: 3592)
SVWQRRRRI,;
CCDS2431.2, Ins, A_8,
(SEQIDNO: 3593)
TFNMPYKSQ,;
CCDS1521.1, Del, A_8,
(SEQIDNO: 3595)
TVGRPHISC,;
CCDS3740.1, Del, A_8,
(SEQIDNO: 3596)
WRPFPWAQR,;
CCDS33175.2, Del, A_8,
(SEQIDNO: 3597)
WVNTPRRRL,;
CCDS3587.1, Del, A_8,
(SEQIDNO: 3598)
DFFQGLQI,;
CCDS41736.1, Del, A_8,
(SEQIDNO: 3599)
DPAGKLKK,;
CCDS43482.1, Del, A_8,
(SEQIDNO: 3600)
FHIKVATQ,;
CCDS5089.1, Del, A_8,
(SEQIDNO: 3601)
FSILPSSR,;
CCDS14439.1, Del, A_8,
(SEQIDNO: 3602)
ICQVIKRL,;
CCDS47751.2, Ins, A_8,
(SEQIDNO: 3603)
IKLGPEML,;
CCDS1614.1, Ins, A_8,
(SEQIDNO: 3604)
ISPTSQYN,;
CCDS2881.1, Del, A_8,
(SEQIDNO: 3605)
ISTQICWN,;
CCDS54430.1, Del, A_8,
(SEQIDNO: 3606)
IVVPKRNI,;
CCDS3468.1, Ins, A_8,
(SEQIDNO: 3607)
KAEENWQR,;
CCDS643.1, Ins, A_8,
(SEQIDNO: 3608)
KCQKGSPT,;
CCDS3754.1, Ins, A_8,
(SEQIDNO: 3609)
KDWCEEEG,;
CCDS32270.1, Ins, A_8,
(SEQIDNO: 3610)
KEGIFKGT,;
CCDS14214.1, Ins, A_8,
(SEQIDNO: 3611)
KEVRCSGC,;
CCDS7148.1, Ins, A_8,
(SEQIDNO: 3613)
KFLRAAVH,;
CCDS53722.1, Ins, A_8,
(SEQIDNO: 3614)
KGGQEGRF,;
CCDS2702.1, Ins, A_8,
(SEQIDNO: 3615)
KNFERESF,;
CCDS2924.1, Ins, A_8,
(SEQIDNO: 3616)
KPKNGERQ,;
CCDS32306.1, Ins, A_8,
(SEQIDNO: 3617)
KPLHQAIL,;
CCDS42721.1, Ins, A_8,
(SEQIDNO: 3618)
KSEKQARS,;
CCDS47169.1, Ins, A_8,
(SEQIDNO: 3619)
KSRQSIPP,;
CCDS8318.1, Ins, A_8,
(SEQIDNO: 3620)
KYFDIQNI,;
CCDS3785.1, Del, A_8,
(SEQIDNO: 3621)
LKLAEVGS,;
CCDS9884.1, Del, A_8,
(SEQIDNO: 3622)
LVLLNWLP,;
CCDS9246.1, Del, A_8,
(SEQIDNO: 3623)
MEDMIWES,;
CCDS45026.1, Del, A_8,
(SEQIDNO: 3624)
MKKRIMVH,;
CCDS31023.1, Ins, A_8,
(SEQIDNO: 3625)
NHGTGSVV,;
CCDS47917.1, Ins, A_8,
(SEQIDNO: 3626)
NPGVSAAG,;
CCDS44839.1, Ins, A_8,
(SEQIDNO: 3627)
NQRKISCS,;
CCDS54426.1, Ins, A_8,
(SEQIDNO: 3628)
NTLRTECC,;
CCDS54773.1, Ins, A_8,
(SEQIDNO: 3629)
NYQETYSR,;
CCDS1336.1, Del, A_8,
(SEQIDNO: 3630)
QLLNLIAL,;
CCDS42686.1, Del, A_8,
(SEQIDNO: 3632)
QTLQEFVI,;
CCDS46422.1, Ins, A_8,
(SEQIDNO: 3633)
REYGHSCS,;
CCDS46286.1, Del, A_8,
(SEQIDNO: 3634)
RNWLRSWL,;
CCDS42443.1, Del, A_8,
(SEQIDNO: 3635)
RRMVLLKS,;
CCDS6940.1, Ins, A_8,
(SEQIDNO: 3636)
SHSLSSVL,;
CCDS34882.1, Ins, A_8,
(SEQIDNO: 3637)
SHSRGLRW,;
CCDS3445.1, Ins, A_8,
(SEQIDNO: 3638)
SILGMAQG,;
CCDS31050.1, Del, A_8,
(SEQIDNO: 3639)
SKMTQIIQ,;
CCDS56348.1, Ins, A_8,
(SEQIDNO: 3640)
SVGRAFGG,;
CCDS6018.1, Del, A_8,
(SEQIDNO: 3641)
SWKKKKRK,;
CCDS54586.1, Ins, A_8,
(SEQIDNO: 3642)
THQSRKVK,;
CCDS55593.1, Del, A_8,
(SEQIDNO: 3644)
WNLLFLRR,;
CCDS9344.1, Del, A_8,
(SEQIDNO: 3645)
YRKTKNQN,;
CCDS4681.1, Del, A_9,
(SEQIDNO: 3646)
KYCHLRLPSQAPLKGKRAQNQAQPNLLPQNQHHLLRQWTQTVQAPRFPLL
KSRSSWIQPLWSQELWMPSQWRVLEILTN,;
CCDS6913.1, Ins, A_9,
(SEQIDNO: 3647)
KMEGSQADEKTGAAAGTGGTGKAPGRGGGSGREGGPRAALHTERSPAGLH
PGQCSVAGASHLLGRSDCQSLCHLLCG,;
CCDS41878.1, Del, A_9,
(SEQIDNO: 3648)
NLDLQHQRRRKKKKDKVEIRNRSPKANSTECQGEHSREQNLLNLVQLNPH
SPHHRKDEEDHQKRHHHHNQKKMSV,;
CCDS30603.1, Del, A_9,
(SEQIDNO: 3649)
KFLIHLRKVDTHHLQVVTKTVTATTADGQRMRRLKCKACRLRWARPEPAA
QAPPKSHFPPHPSGPSRTSSLQLR,;
CCDS32004.1, Del, A_9,
(SEQIDNO: 3652)
NYGHCNSPLAFLTQLLPRPTSNPWWMTRRDPFCGGNLISTKLENFVSGIS
AGTERRQMNLCFLY,;
CCDS43378.1, Ins, A_9,
(SEQIDNO: 3653)
KTGSNEVTTRYEEKKTGSVRKANRMPKDVNIQVRKKQKHETRRKSKYNED
FERAWREDLTIKR,;
CCDS6573.1, Del, A_9,
(SEQIDNO: 3654)
MCSSLALPTGLTSLILPSSDLAVLISSSTSHFLMRSPVLPSSRLTCASPQ
LPRMWTWSSWLK,;
CCDS34225.1, Del, A_9,
(SEQIDNO: 3656)
VIAILSSMCQEILNRIAHRRKEVRKLKQILFQVEETKSGRFWIKHDLVSC
LQSYLVMEA,;
CCDS517.1, Del, A_9,
(SEQIDNO: 3657)
KQWSSVTSLEWTAQERGCSSWLMKQTWMKSWSLRDPSYRSILEYVSTRVL
WMPTSTV,;
CCDS1207.1, Del, A_9,
(SEQIDNO: 3658)
ALRSMPKSRNQVLFRRNLTPSQLRTLAPPYMLLPQSLSQSLSRKQIPSQS
MLV,;
CCDS734.1, Del, A_9,
(SEQIDNO: 3660)
TSRILNLQVLKKILRSFMKLYHSLVMCLRLRTKLEKALSALFIWPQHSY
K,;
CCDS2256.1, Del, A_9,
(SEQIDNO: 3661)
YKGRKERKTSVQGITTVILKRRTSLRRESFMKNFLAVTITGKKPRKSPG
S,;
CCDS13289.1, Ins, A_9,
(SEQIDNO: 3663)
KVICTFYPTDRTEIFTRKRSSHYSCCISHPKCEPVTEYCGWSEKCTK,;
CCDS11614.1, Ins, A_9,
(SEQIDNO: 3664)
KRSLSLSVQANYTSSSTTLTRKSRYFFNRYISKQKLANIILELQFS,;
CCDS35176.2, Del, A_9,
(SEQIDNO: 3665)
PGLRPSQHLLLYITLRVVKWIPALATASAWPAPSAKTVWHPTLLI,;
CCDS1113.2, Del, A_9,
(SEQIDNO: 3666)
QRKVVKNPSQPVPLRNDGITNGNDSTRSCSISLKKSLEKMPLM,;
CCDS1551.1, Del, A_9,
(SEQIDNO: 3667)
GRRKRSEGGVKRKKENVCKRRKRNVGEKKRKGFDGRKRKGDG,;
CCDS41878.1, Ins, A_9,
(SEQIDNO: 3668)
KIWTSSTRGGGRRRKTKWKYGTEVQKQTAPSVKESTAESRIS,;
CCDS11681.1, Ins, A_9,
(SEQIDNO: 3669)
KSSFPATDFRPLPFCILVWPSTGGCFPVLFDPPANANNGLYF,;
CCDS8395.1, Del, A_9,
(SEQIDNO: 3670)
NGIWEVMPRTLEGCISVKDHRTSQNHSKCITECVRTALN,;
CCDS43689.1, Del, A_9,
(SEQIDNO: 3672)
NVNVCSPKILILKHQKMIRDFRRNLRKWLKSYKGKKQI,;
CCDS8723.1, Ins, A_9,
(SEQIDNO: 3673)
KLESCGRCKGWTQSKDYIETKESENSIWEQDKKQPDQ,;
CCDS58290.1, Del, A_9,
(SEQIDNO: 3674)
NQESALTMKMMMMKKMGITFIPLSLPPRSVTALKS,;
CCDS46450.1, Del, A_9,
(SEQIDNO: 3675)
KKQTRRRKLLLLCKKNQILKKKGEKLKHCFKAWG,;
CCDS55048.1, Ins, A_9,
(SEQIDNO: 3676)
KRRRRSKKSHRRGIETRRRKSKATGTYESEGKRS,;
CCDS43758.1, Ins, A_9,
(SEQIDNO: 3677)
KIGSPRRRKIWKGWNQTICKYFSACYQNCFTQ,;
CCDS3368.1, Del, A_9,
(SEQIDNO: 3679)
NIRKLIWTKQRSFLSLFPKLRATEQMTNVGC,;
CCDS8300.1, Del, A_9,
(SEQIDNO: 3680)
WKKTQADCFFGLLKKIGLPQCGDSFLKRPLT,;
CCDS5061.1, Ins, A_9,
(SEQIDNO: 3681)
KETFKKKTYTCAITTVKATETKAGKWSRWE,;
CCDS9151.1, Del, A_9,
(SEQIDNO: 3682)
SQTKNRFSQKCRRPITPGNCRNRFTFWKPV,;
CCDS11681.1, Del, A_9,
(SEQIDNO: 3683)
KLIPSYGFQASTLLHTGLAKHWWMFPCTF,;
CCDS58167.1, Del, A_9,
(SEQIDNO: 3684)
CKSWKQNSMKKNRKGNACKLRQLSCRLV,;
CCDS7417.1, Del, A_9,
(SEQIDNO: 3685)
TGMEILLWILLKMEIQIFKICLGEMQLC,;
CCDS33716.1, Del, A_9,
(SEQIDNO: 3686)
CTNLSVPMMLTILIWKRVFILLLSDKK,;
CCDS58577.1, Del, A_9,
(SEQIDNO: 3687)
GQAFGSFSADFSAPQVTRLRSLNHLLI,;
CCDS2054.1, Ins, A_9,
(SEQIDNO: 3688)
KRRDHSCDHFPPQDHISFSGVKTDNPV,;
CCDS34139.1, Ins, A_9,
(SEQIDNO: 3689)
KRSCIESLTKYQQQQQFYSWDSKSATL,;
CCDS10987.1, Ins, A_9,
(SEQIDNO: 3690)
KTEKQEKQHGRSIGKRTRRYRSHPRED,;
CCDS35457.1, Ins, A_9,
(SEQIDNO: 3691)
NSGRNRKEGNINPRECSFASDTYSDWH,;
CCDS3171.1, Del, A_9,
(SEQIDNO: 3692)
CLESGTDHILTEILSISCKKMNQMEL,;
CCDS10124.1, Ins, A_9,
(SEQIDNO: 3693)
KSRTLGNCGPYCTSKAYNNQPTMETH,;
CCDS34872.1, Ins, A_9,
(SEQIDNO: 3694)
NFCDKASAKVLGPRREIENWTTECKQ,;
CCDS2316.1, Del, A_9,
(SEQIDNO: 3695)
LQKKAPQKRIKLLRMLPALYLMACQ,;
CCDS5931.1, Del, A_9,
(SEQIDNO: 3697)
RNKKTKLWFSLINIFIHRKNPLLPMR,;
CCDS13482.1, Del, A_9,
(SEQIDNO: 3698)
TIKISQIQNQSVNKNFHIHLKRTYQ,;
CCDS32123.1, Del, A_9,
(SEQIDNO: 3699)
KNLAIVEEEMFLVMGELNYVPLAL,;
CCDS34487.1, Ins, A_9,
(SEQIDNO: 3700)
KTAGRGSRKAEAYSRRNGKGKKKT,;
CCDS9971.1, Del, A_9,
(SEQIDNO: 3701)
LCTICTSYVSPWIIFTEMEYFTEM,;
CCDS34734.2, Del, A_9,
(SEQIDNO: 3702)
NPRRKTWKMRKKYAQKPSQKNHLY,;
CCDS43133.1, Ins, A_9,
(SEQIDNO: 3703)
NYCLFQRESAWWKQPGNSCSGDNF,;
CCDS53578.1, Ins, A_9,
(SEQIDNO: 3704)
KCVRYIQGEGSCLSPPSSDGSLL,;
CCDS11672.1, Ins, A_9,
(SEQIDNO: 3705)
KREETGRRRNDAASDMGKIHISS,;
CCDS3418.1, Ins, A_9,
(SEQIDNO: 3706)
KSEEWTSQQSGLRTKGHSGQHPD,;
CCDS9462.1, Ins, A_9,
(SEQIDNO: 3707)
KTGGIETSAGCKEKETRNFRKAH,;
CCDS5098.1, Del, A_9,
(SEQIDNO: 3708)
NVLCKQQNGLPAPEHVGWEYLTG,;
CCDS9087.1, Ins, A_9,
(SEQIDNO: 3709)
NYDGNSAARDSKCSEVSSIHVIL,;
CCDS3091.1, Ins, A_9,
(SEQIDNO: 3710)
KRESFLWNHGYPTSTNRRPNDQ,;
CCDS11974.1, Del, A_9,
(SEQIDNO: 3711)
KRNSRRATPTSKGSLRRKYLRV,;
CCDS13482.1, Ins, A_9,
(SEQIDNO: 3712)
NERKVKRERIYQCSRILDKPNQ,;
CCDS2222.1, Del, A_9,
(SEQIDNO: 3713)
NMEHRLTMDSALSLTKREGPET,;
CCDS5098.1, Ins, A_9,
(SEQIDNO: 3715)
KMSCASNKMDSLLQNMWDGNI,;
CCDS3436.1, Del, A_9,
(SEQIDNO: 3716)
KNKWNAMVVLNKSLNRVHLLG,;
CCDS43133.1, Del, A_9,
(SEQIDNO: 3717)
LLFIPTGISLVETAREQLFRG,;
CCDS10063.1, Del, A_9,
(SEQIDNO: 3718)
LLQPCLKALSVPLWKMPSRAS,;
CCDS9474.1, Ins, A_9,
(SEQIDNO: 3719)
NPGEICPLHRANHCTQIEHHY,;
CCDS10154.1, Del, A_9,
(SEQIDNO: 3720)
FREKRNYVKKKSKLKKKEKK,;
CCDS9300.2, Ins, A_9,
(SEQIDNO: 3721)
KILLFQSIEHTCLKCFKRGC,;
CCDS34260.1, Del, A_9,
(SEQIDNO: 3722)
KLLKKSSQLRRSWRNVSRIS,;
CCDS11974.1, Ins, A_9,
(SEQIDNO: 3723)
KRGIPEGPPRPPRAACGGNI,;
CCDS56247.1, Ins, A_9,
(SEQIDNO: 3724)
KRWSEKIAHVWHRDSGVSTA,;
CCDS43493.2, Del, A_9,
(SEQIDNO: 3725)
KSATTTTVILEIIIMDRVIP,;
CCDS46547.1, Ins, A_9,
(SEQIDNO: 3726)
KTRLFARGTVLLERRRYYWC,;
CCDS58578.1, Ins, A_9,
(SEQIDNO: 3727)
KVKHLAVCANSFQPTFQLLK,;
CCDS3091.1, Del, A_9,
(SEQIDNO: 3728)
KGELSLEPWIPYLHQQKTQ,;
CCDS9944.2, Ins, A_9,
(SEQIDNO: 3729)
KIRLSEQELSEFSLSSSEY,;
CCDS3179.1, Ins, A_9,
(SEQIDNO: 3730)
KPQQSESICHGNWKEDSSP,;
CCDS46450.1, Ins, A_9,
(SEQIDNO: 3731)
KRNRPEEGSCCSCARRIRS,;
CCDS58294.1, Del, A_9,
(SEQIDNO: 3732)
LTDFFVLWKASGTIQFNCK,;
CCDS731.1, Ins, A_9,
(SEQIDNO: 3733)
KKAKNGCKQDNSLYRGLL,;
CCDS1207.1, Ins, A_9,
(SEQIDNO: 3734)
KPYDLCPSPETRSSSEET,;
CCDS6343.1, Ins, A_9,
(SEQIDNO: 3735)
KRRAQRRQSDSSYSVIEG,;
CCDS58191.1, Ins, A_9,
(SEQIDNO: 3736)
NIPQPLEKNRFCSSSSAA,;
CCDS3630.1, Ins, A_9,
(SEQIDNO: 3737)
NNSDHMWRLPFSCTLKRW,;
CCDS35176.2, Ins, A_9,
(SEQIDNO: 3738)
NQACVPANTFCSTSRCEL,;
CCDS41630.1, Del, A_9,
(SEQIDNO: 3739)
ILFHVRNIVYGIQVMLC,;
CCDS180.1, Ins, A_9,
(SEQIDNO: 3740)
KTAENKEHSVKQDIERT,;
CCDS10374.2, Ins, A_9,
(SEQIDNO: 3741)
KTEEEREQGEQGETNEF,;
CCDS2936.1, Del, A_9,
(SEQIDNO: 3742)
NILNSLPSSMEIAVLQE,;
CCDS41816.1, Del, A_9,
(SEQIDNO: 3743)
FQKNGALRIFLLLSKC,;
CCDS10124.1, Del, A_9,
(SEQIDNO: 3744)
IQNLGKLWTLLYLKSL,;
CCDS11672.1, Del, A_9,
(SEQIDNO: 3745)
KRRNRKKKKRCSKRHG,;
CCDS58577.1, Ins, A_9,
(SEQIDNO: 3746)
KVKHLAVFQPTFQLLK,;
CCDS5627.1, Del, A_9,
(SEQIDNO: 3747)
LGQIIMKKMRRPVCYK,;
CCDS41534.1, Ins, A_9,
(SEQIDNO: 3748)
NGRLLTLLNYSEGSLE,;
CCDS10987.1, Del, A_9,
(SEQIDNO: 3749)
NRKTRKAAREKHRKTD,;
CCDS41350.1, Del, A_9,
(SEQIDNO: 3750)
NSRKKLLEDMKQNGFT,;
CDS7352.1, Del, A_9,
(SEQIDNO: 3751)
SNGMEACGTHPTPRLS,;
CCDS7352.1, Ins, A_9,
(SEQIDNO: 3752)
KATEWRHAELTQHLA,;
CCDS11990.1, Ins, A_9,
(SEQIDNO: 3753)
KENGIQLEQLGRNTL,;
CCDS56554.1, Ins, A_9,
(SEQIDNO: 3754)
KIQGDFEALRCEGCD,;
CCDS54773.1, Del, A_9,
(SEQIDNO: 3755)
LMLLRLNLRKMCGPF,;
CCDS34028.1, Del, A_9,
(SEQIDNO: 3756)
LMNILKRVPKSLGLT,;
CCDS5411.1, Del, A_9,
(SEQIDNO: 3757)
LTETVYSTTQQIHSS,;
CCDS10363.1, Del, A_9,
(SEQIDNO: 3758)
MKALISQEMFSQALL,;
CCDS9151.1, Ins, A_9,
(SEQIDNO: 3759)
NRKPKTDFRKNAGGQ,;
CCDS1589.1, Ins, A_9,
(SEQIDNO: 3760)
KAQLHFAAESIIII,;
CCDS33771.1, Ins, A_9,
(SEQIDNO: 3761)
KRIQLYLYEAMCRK,;
CCDS46495.1, Del, A_9,
(SEQIDNO: 3762)
KRRKWQIRHVLKNL,;
CCDS9684.1, Ins, A_9,
(SEQIDNO: 3763)
KSHQQVHGDFRKYI,;
CCDS31756.1, Ins, A_9,
(SEQIDNO: 3764)
KSPDKENKAVFRGF,;
CCDS1852.1, Ins, A_9,
(SEQIDNO: 3765)
NRRKEGPNSNREEY,;
CCDS10374.2, Del, A_9,
(SEQIDNO: 3766)
NRRRKRTRRTRRNK,;
CCDS10154.1, Ins, A_9,
(SEQIDNO: 3767)
NSERREIMSKRKAN,;
CCDS2256.1, Ins, A_9,
(SEQIDNO: 3768)
NTKEEKKEKQVFRA,;
CCDS552.2, Del, A_9,
(SEQIDNO: 3769)
RKMQSLNHPSRLTN,;
CCDS33451.1, Del, A_9,
(SEQIDNO: 3771)
ASTFYLDGNVSS,;
CCDS55048.1, Del, A_9,
(SEQIDNO: 3772)
KKKKKQEKPQKRN,;
CCDS9544.1, Del, A_9,
(SEQIDNO: 3773)
KRQINRRKLQRKK,;
CCDS53961.1, Ins, A_9,
(SEQIDNO: 3774)
KSQKDKSPDELQG,;
CCDS4681.1, Ins, A_9,
(SEQIDNO: 3775)
KSTVTYGCQAKPL,;
CCDS8300.1, Ins, A_9,
(SEQIDNO: 3776)
NGKRPKQIASLGC,;
CCDS53775.1, Ins, A_9,
(SEQIDNO: 3777)
NSRAFSCNKEKGI,;
CCDS34233.1, Del, A_9,
(SEQIDNO: 3778)
RKSGVMKCWDLCP,;
CCDS46450.1, Del, A_9,
(SEQIDNO: 3779)
GEKLKHCFKAWG,;
CCDS41878.1, Ins, A_9,
(SEQIDNO: 3780)
KCPCRTLQTSSY,;
CCDS32004.1, Ins, A_9,
(SEQIDNO: 3781)
KITDIATHPWLS,;
CCDS2710.2, Del, A_9,
(SEQIDNO: 3782)
KMEVPSCCLDHC,;
CCDS879.1, Ins, A_9,
(SEQIDNO: 3783)
KRYSRKQATECL,;
CCDS34139.1, Ins, A_9,
(SEQIDNO: 3784)
KSKSRFASRSKA,;
CCDS34872.1, Del, A_9,
(SEQIDNO: 3785)
LLRQGKCQSAWS,;
CCDS34470.1, Ins, A_9,
(SEQIDNO: 3786)
NDKSLCHCDRWT,;
CCDS35118.1, Ins, A_9,
(SEQIDNO: 3787)
NKCSTNSTIRTA,;
CCDS6573.1, Ins, A_9,
(SEQIDNO: 3788)
KCVHHWRYQPA,;
CCDS5931.1, Ins, A_9,
(SEQIDNO: 3789)
KGTRKQNSGSL,;
CCDS1787.1, Del, A_9,
(SEQIDNO: 3790)
KMLNQKCLAPF,;
CCDS5593.1, Del, A_9,
(SEQIDNO: 3791)
KPGTSLQCYLN,;
CCDS7417.1, Ins, A_9,
(SEQIDNO: 3792)
KQGWKYSFGSC,;
CCDS46495.1, Ins, A_9,
(SEQIDNO: 3793)
KREGNGRSDMY,;
CCDS46547.1, Del, A_9,
(SEQIDNO: 3794)
NKIICKGHRIT,;
CCDS11685.1, Ins, A_9,
(SEQIDNO: 3795)
NKRIFKDNGTS,;
CCDS44556.1, Del, A_9,
(SEQIDNO: 3796)
NQYQRSLQCWP,;
CCDS4246.1, Del, A_9,
(SEQIDNO: 3797)
NWISKKLNLTM,;
CCDS42794.1, Del, A_9,
(SEQIDNO: 3798)
ILAMTLTLNG,;
CCDS45704.1, Ins, A_9,
(SEQIDNO: 3799)
KDTERGAKAI,;
CCDS1551.1, Ins, A_9,
(SEQIDNO: 3800)
KEGGRGAKAA,;
CCDS3436.1, Ins, A_9,
(SEQIDNO: 3801)
KRTNGTRWLF,;
CCDS5593.1, Ins, A_9,
(SEQIDNO: 3802)
KSLVPHCNVT,;
CCDS2316.1, Ins, A_9,
(SEQIDNO: 3803)
NFRRRHLRRE,;
CCDS2955.1, Ins, A_9,
(SEQIDNO: 3804)
NKEEIAVHYL,;
CCDS47335.1, Del, A_9,
(SEQIDNO: 3805)
NKVRQNFKRN,;
CCDS9474.1, Del, A_9,
(SEQIDNO: 3806)
SGRNLPTAPC,;
CCDS47457.1, Del, A_9,
(SEQIDNO: 3807)
VLTKQKVLYK,;
CCDS34734.2, Ins, A_9,
(SEQIDNO: 3809)
KIPEEKLGR,;
CCDS11614.1, Del, A_9,
(SEQIDNO: 3810)
KKPLTFSPS,;
CCDS56248.1, Del, A_9,
(SEQIDNO: 3811)
KMEITMMIS,;
CCDS2710.2, Ins, A_9,
(SEQIDNO: 3812)
KRWRCPVVV,;
CCDS389.1, Ins, A_9,
(SEQIDNO: 3813)
KTYCYHKYK,;
CCDS58167.1, Ins, A_9,
(SEQIDNO: 3814)
NARVGSKTP,;
CCDS41445.2, Ins, A_9,
(SEQIDNO: 3815)
NEAFSHGAI,;
CCDS34487.1, Del, A_9,
(SEQIDNO: 3816)
NSRKRKQKG,;
CCDS9971.1, Ins, A_9,
(SEQIDNO: 3817)
NYALYVPVM,;
CCDS9684.1, Del, A_9,
(SEQIDNO: 3818)
VPSASPWGL,;
CCDS13289.1, Del, A_9,
(SEQIDNO: 3819)
GHLHLLPH,;
CCDS486.2, Ins, A_9,
(SEQIDNO: 3820)
KCPPAALV,;
CCDS6343.1, Del, A_9,
(SEQIDNO: 3822)
KKSTEKTK,;
CCDS41630.1, Ins, A_9,
(SEQIDNO: 3823)
KSCSMSEI,;
CCDS43493.2, Ins, A_9,
(SEQIDNO: 3824)
KSLLLLRR,;
CCDS11874.1, Ins, A_9,
(SEQIDNO: 3825)
KTSENTPF,;
CCDS14131.1, Ins, A_9,
(SEQIDNO: 3826)
KTTKKAET,;
CCDS879.1, Del, A_9,
(SEQIDNO: 3827)
KVQQKASN,;
CCDS53577.1, Ins, A_9,
(SEQIDNO: 3828)
KVRSLHTR,;
CCDS33716.1, Ins, A_9,
(SEQIDNO: 3829)
NAQICQFQ,;
CCDS13093.1, Del, A_9,
(SEQIDNO: 3830)
NMKPSLLL,;
CCDS47839.1, Ins, A_9,
(SEQIDNO: 3831)
NTDWNKTL,;
CCDS13548.1, Del, C_10,
(SEQIDNO: 3832)
LRSPQTSPLRLRTRWVWSGPQAGVSAARRPRWRCSTCRR,;
CCDS55731.1, Ins, C_12,;
(SEQIDNO: 3833)
PPYPPSWPLAEGAGLLLLCKRHCGFAFQHRNREKRFNVQMLFPIIHGCK
S,;
CCDS55731.1, Del, C_12,
(SEQIDNO: 3834)
PVPPELAPGRRSWFVVIMQAALWVCVSA,;
CCDS41411.1, Ins, C_7,
(SEQIDNO: 3835)
LGVAGRLLGTSSGSFIHLQGTPVPKPGPSPASPASRPPSWLGFGPAPAPT
PACPSPKEEEPTWTAAHSGGAVRGGPGCQPSGWRGGPSREGAGRAGRPGG
P,;
CCDS43088.1, Ins, C_7,
(SEQIDNO: 3836)
PAASQGKQGRDVRRALTGSCGLAAAEPEQARPGQAGPEGPDWGEAAAEAA
GRRRSSPRCFLQKSRPHSSGSAWRRCVTSGSGSTHGRSGRDRLPARGP
V,;
CCDS8162.1, Del, C_7,
(SEQIDNO: 3837)
RSCRRRPSCHRCTAWCCQSGTCSGRSRPSWPSCPIPRRDPRPGHRSASPG
PKPSLRPSSWQECDEAPSLRCLGLWCSPRRSPDHRGGNPRPAARLSMG
S,;
CCDS46143.1, Del, C_7,
(SEQIDNO: 3838)
SCSPRSSAMPPVPLPAPPKSASTSLSQPPAMGHPSHLHRHPRLHHPCPCS
SRPTSAAMAWSPRPPAPACDPRRAWIRQAPCRNCSGLWSRCPRRLGIL
A,;
CCDS398.1, Del, C_7,
(SEQIDNO: 3839)
CSRCSRHLAGLALALWGNQSSSWPITLRWTSLRSTCTTTRWTSSRISVPV
ESTGKWWNTWSSISSLRSLVIASLCMMERRTFTLSQHCPLATNGSTLR,;
CCDS7667.2, Del, C_7,
(SEQIDNO: 3840)
LPAGFSPPRPPAPSHPRPSCRRCPPEACPRTLPTSKAPPSLTRCGSGTRT
SCGCPSRRPGPSSARGGVCPATATRGASSSAPSACGRARCSVRSARAR,;
CCDS42092.1, Del, C_7,
(SEQIDNO: 3842)
PARQARAQDRWRTQRPGPASSPGSRSPSHVRHLHEIGWASVPGLPKVAMA
PGTPGIRGPHAPPTWLPARPSRLPGSAAAPTLPRALARLPPAVGGCV,;
CCDS7845.1, Ins, C_7,
(SEQIDNO: 3843)
TPAPGAGGGGGSPAGGAPLCPFIHRPLQCRDWEDRLLHCHQHLLPAAAAG
GCGGHPEDHVPAPSGQGRHDPDMRAVPVCAPRHEPLRKAAVPPVPRM,;
CCDS47583.1, Del, C_7,
(SEQIDNO: 3844)
CLVKKTVHLPIFPNSLAMVIRMSGCSSSSELTQTRGPRRPPGHQCYLSPH
ETWKVPRMQPGSRMQRLLKVLRTPQSLLKAQKNLYLHQHQQSSN,;
CCDS45544.1, Del, C_7,
(SEQIDNO: 3845)
GPLGSRQLPAACSRPSPSPTARTNPGRHHQSSGRQSRATHRGRTDWARPS
PRGDPCSGPPRGAQLSTVLNLPSHTPTGRPRPRVTSSASSSGRD,;
CCDS32732.1, Del, C_7,
(SEQIDNO: 3846)
IAPSCLWQRGKTSSPFPRRPSTTSCSASCSSSASPSAPASSALASHCRAS
VTAPGTATSPTAPPSCCPATTTGLQPGLRTLPMDCCRLRSSRPP,;
CCDS35368.1, Del, C_7,
(SEQIDNO: 3848)
RAAAAAAGGSPCRHLRAAEWGPYFLPRPPPPLPHPPHRPPPRPHRRAPGR
WWCQQRCAAFASMCSTVTCMDTSSPGPPDSPTSPMPLKIAVFPQ,;
CCDS11409.1, Ins, C_7,
(SEQIDNO: 3849)
RLCPQSRGRGLHALPLQWLLDGRHPLRFQLLPQPHLQYLYRAGLHHPRDG
PGAAGCLHGGTPENYHPPAPRLWGEWNWRQDPWLCRANLQRPCH,;
CCDS4856.1, Del, C_7,
(SEQIDNO: 3850)
SPTIPCPTDSLLCSHLGETALPTRRPPAPTPCTDTESASGQAVRPCVKTW
ASLSNTSTQSTPWMTGVQPSAGYRCRWCSSWRSSSPRRASGCRP,;
CCDS55892.1, Del, C_7,
(SEQIDNO: 3851)
SRSPKSMSPPGRTQLPPSQLPQPHRHRKTCSRRATPLSSLAAAPGARAGA
RHPPPTRRQRSLCSSQPSQPRPRSCLGTPLAGLPACPSPCPPVR,;
CCDS32435.1, Del, C_7,
(SEQIDNO: 3852)
VGPLGRPSSRFHPRRRQPTACRMLYMHRGRRAEGHTHGRPTTCPCQWQPS
PCPPPQSRERRPGCHPGKKQSWQRARPSRQQAPWAVCSPCWSRR,;
CCDS9278.1, Del, C_7,
(SEQIDNO: 3853)
CSQRGQLGPFMNCPARNRRNTRREGWRITAGKPTRRSTSPRWKSVSPPSA
SGKTPSTWTPCVPSGTGVTSSKGSTRCGKRSSRRPWRWATRLR,;
CCDS10544.1, Ins, C_7,
(SEQIDNO: 3854)
RGPGRAGQAGLGAGPQTSKYPTGGPVPIRRREDLGDGQRLSPTPTAGRRV
RAGLPQLPPAMLPGGPVAGSEWRNQGQGAPAVPSIDPKEEEAL,;
CCDS8421.1, Del, C_7,
(SEQIDNO: 3856)
TSSPRTMSWLCCLGQIMASAVEASQPPTWPSMPRRTPVGPVSSPARQEGV
RVCSGCVTCGETAPMAAMTTAAAPCSHPQSWPVSLSRWRCASV,;
CCDS54707.1, Ins, C_7,
(SEQIDNO: 3857)
ARVPVPDVTAAAAAAAAAAESGAAGRPGPRRARRECRPRAEPPMRGLPRL
RVHAARPAGPAEDSLQPGRADGDPTAAGRAPCPVCLLASGAL,;
CCDS7667.2, Ins, C_7,
(SEQIDNO: 3859)
SCPRGSAPRDHPPRATPAPRAAAARRKPAPVPSLLRRRPLPSPAVAPGHV
QAVGAPAAAQDHQAHAAASVPQPRPGAPHPQMPPAAAPGAL,;
CCDS12922.1, Ins, C_7,
(SEQIDNO: 3861)
PAATAAPALSAGNFPEAAGPGGCVPGPDAGRLDGPLLPEPGPAAGGCPQD
PRLSLPPCLPAGKWLYHPALHALLHGDQRGQDRVHSCLEKE,;
CCDS6380.1, Del, C_7,
(SEQIDNO: 3862)
PGMGRSPPLPPWWAAWTPTPIATAPPCACSSTGRRSYKTWPPWSASSSSS
STSPRASSPPASSSTATVSLKASSSRFSTTSCWPSVRPVSS,;
CCDS8931.1, Ins, C_7,
(SEQIDNO: 3863)
PGTEDSDQVPGWSSIPVGLEVPGGPSQASAGQGRHGDREAGAGAECASGS
WGWSRKHWRNHQQHCALGEQHSWELLLCPVQEPASQEDQAV,;
CCDS3707.1, Ins, C_7,
(SEQIDNO: 3864)
RSQPGIHPAESCGHRLLRGDVLPAGACVRGNSRSIHRVSHSSAQCCCPCS
RGTSHGLKVPLLLWCQRFGHGFLLHAGGNHYSCHNSGICVG,;
CCDS42103.1, Ins, C_7,
(SEQIDNO: 3866)
PDAHQNPTRLSPGPWGTSWSSPSYGQGEAHPAAAAADRAPHVTPLPASVT
DAPRLCLRAAPARGGRGGAGCPGACAPTRADGCAHTVPAP,;
CCDS34562.1, Ins, C_7,
(SEQIDNO: 3867)
PPLLLPLHCLHPHHQAPNSRSEQHERLCQLPISRQRAAALHHEAHRGRPG
GGRPVLHALPGVPGRACAHPQRAAHQQAAARVRHHGPADR,;
CCDS32755.1, Del, C_7,
(SEQIDNO: 3869)
RAPLRRGKRPLWESRRGWAQRRASHSTSGRPLRLPTGRGRGRRRSARRTQ
LPAPCRRGRHRDSLGAPCTGGRARHSCPLSDGRKMAHSHR,;
CCDS12235.1, Ins, C_7,
(SEQIDNO: 3870)
APRGPPVLGGGNVVAGGLHPRRAFSSLRGPGLPGAGGPDAECDSHEPRGH
ANGHSHSHGARGSGGCPGDRLQRDPRGRETGGPGELDGL,;
CCDS42824.1, Ins, C_7,
(SEQIDNO: 3873)
PGPANPSAAPHTLCSDHSVPPAVRPRPGPLAGPCRAAFRAQAPRCCLCQG
GLPTSGSPREARALSRGSPGASRESPSSHGAPQARQQSQ,;
CCDS3883.1, Ins, C_7,
(SEQIDNO: 3874)
RAGLLCSLEPGRGRQDVRYVHPRALPASPWRGPRGRPQRAQQAAPRRGRR
GVRARSGADPQDEGAGEPQERRRERLGVEPRRPRQGRAR,;
CCDS13132.1, Del, C_7,
(SEQIDNO: 3875)
RTAAATAAAAAAAAAAARGSLEEQRAARPRTPPRAKPPSPATPRAPMDTW
RPSSARSPDRKSSSPQARAATRWFTAVTCVARASVCSAC,;
CCDS42972.1, Del, C_7,
(SEQIDNO: 3876)
APQAPQAHVATLGFQVPRERASGASPAHLDLRDPPASATRGARALPAPQA
PQGPLHFLALTGRLSAFPALRAPLGPLGPLEPWAPPQG,;
CCDS34863.1, Del, C_7,
(SEQIDNO: 3877)
GGFRQWWCTCRMSGPSCLLWRSGRPCASRKLQRQLPQPRRHKGKRSLLNR
HLMPWSKQQTLLDGTQKLQRPPHSRKRTLISQRPLHPP,;
CCDS47839.1, Ins, C_7,
(SEQIDNO: 3878)
QHGCTCHHLHPLQPCSAGRMEAESKRSCREHHANQGKSEGETPAPGNPWV
LGSFIHRAEWDPRLSWTQLPAGGIPGQEEAHLYPQERSD,;
CCDS55791.1, Ins, C_7,
(SEQIDNO: 3880)
GCGGRGGGGGKQRGWGSRGSGRRLSSLLVVRLVFVFVIVLSLFRAGPAPG
GPGLRRGAAGLGRHRHQPAPVPGRVWGERRGRRQRRG,;
CCDS3037.1, Ins, C_7,
(SEQIDNO: 3881)
HAGGHRQRWGGTTAVLHGAPAAPGCLPRAGGAEPVADPEQPGDGEDPGGA
EPHPETHPDPHGQGGQPAEAVGFIHNDDVFIHQGGGHSS,;
CCDS35368.1, Ins, C_7,
(SEQIDNO: 3882)
PGLRRRRRGDRPVATSELRSGDPTFYPGRRHLFLTLLIVRRLVLIAGLPE
DGGVSRDVLLLLRCALLSPVWIPAAPDPPIHQRALCP,;
CCDS10978.1, Del, C_7,
(SEQIDNO: 3884)
AVGRRCWPRRWPRRLRCPSWRWPAQSSWRSLEASALPVCGASLRKPEPGP
PASSTSMRSTRWARSAPPPCPASPTRRRSRRSTSFW,;
CCDS59410.1, Del, C_7,
(SEQIDNO: 3885)
PAQCPQPQPYPHSSTPSPCLCLCPSGASRRRGQRRGHQMRRMGRPLRPTW
TASRRACARWCCERPRTPRSSGTCHGRGLTPATSRS,;
CCDS41858.2, Del, C_7,
(SEQIDNO: 3887)
SRSPKSMSPPGRTQLPPSQLPQPHRHRKTCSRRATPLSSLAAAPGARAGA
RHPPPTRRPSQPRPRSCLGTPLAGLPACPSPCPPVR,;
CCDS7357.1, Del, C_7,
(SEQIDNO: 3888)
SSPTPRTCPTTWPPSRNPSATPCRKLCHTLAALTSPTPPYNKVCTYHTPA
ASQGLHYITVGLLLLLLPSLPGSRHRPLPAAIHTAT,;
CCDS24.1, Ins, C_7,
(SEQIDNO: 3889)
PGLSGQRLQPQRRPRPRPHTGARPQRHQCHRPREPSPLLPAAGLRAGHAA
ALHPATGHCPPGRPQAPRRLRILGPEVGKVKGEGC,;
CCDS12716.1, Ins, C_7,
(SEQIDNO: 3890)
PGPLIAGSQNGGVSQDVEPQGAPRLGPAVPRALHSLLQGAAAPPPNTGIP
LESGREGGFGGVLGPRGLLHPVPLPPNPGPAAGLI,;
CCDS10440.2, Del, C_7,
(SEQIDNO: 3891)
RPPARRRRRPRRRAAPRTSTTSSGPACGRRARGPGRILRALWGAATPVAR
GPAEKELKVVDHRLEMCLGLPLLPLQGARAPPPGT,;
CCDS55757.1, Ins, C_7,
(SEQIDNO: 3892)
SAHPWGPVQRVRAADPEYSGLERVSDIWGAHLVRDQRVRGLLLRWGAVLC
SQDAAEVSVSKKVRSLQDCGAHALHRAAGEDKFPL,;
CCDS55640.1, Ins, C_7,
(SEQIDNO: 3893)
SPRCHLGPGHQAGPGLHRPPSPWCHLGPGQQARLGLHRPSSPQCHLGLRL
CIRLSFYSGAQRHLCQGYHNPSQQEHSILNSQPPL,;
CCDS41932.1, Ins, C_7,
(SEQIDNO: 3894)
GGAASASPTQPREEAPSPPTSSPPPSSPVTVLGQGDSDLPGEIPGTTANQ
SPLLGMSYGAAAREDHQRPCGVVQNPNSLWLATP,;
CCDS55892.1, Del, C_7,
(SEQIDNO: 3895)
GRTQLPPSQLPQPHRHRKTCSRRATPLSSLAAAPGARAGARHPPPTRRQR
SLCSSQPSQPRPRSCLGTPLAGLPACPSPCPPVR,;
CCDS1687.1, Del, C_7,
(SEQIDNO: 3896)
GRTSGRSLSCCPRPRCRPAVASRSTAPSPRAGSRRCCLRTSCGAARPRRT
RSAWGDWVASPPTRSSSRTACGAASPPARSWSAP,;
CCDS9989.2, Del, C_7,
(SEQIDNO: 3897)
HLLYHHPCQAPVSSCPHHLFIHSRAWDARPHPHPCCLVWAGALLHPHLHY
CPAPAAPPWREAWRRSSWPRWTMAWAQHGSPAIGG,;
CCDS47235.1, Del, C_7,
(SEQIDNO: 3898)
RSGHSSLRHPPTLHPEDWAPPPAQLRERGPVSCSVVEPPCRIIRAGTRRA
RRRIQRRSLGRLWSAAGSSVSGQTTFMGGRIVG,;
CCDS7918.1, Ins, C_7,
(SEQIDNO: 3900)
AHPWGPVQRVRAADPEYSGLERVSDIWGAHLVRDQRVRGLLLRWGAVLCS
QDAEVSVSKKVRSLQDCGAHALHRAAGEDKFPL,;
CCDS56415.1, Del, C_7,
(SEQIDNO: 3901)
SHFLRSQWKFREQKELPLSLSGRMLPQPLEQQQKRPCPEVHLLLLRGAPG
MNRMELQLRQNLGQLQSPQNGSLLSSRTFRASGR,;
CCDS8097.1, Del, C_7,
(SEQIDNO: 3902)
GLPLQSTPLRRLPLQLLLLPPPPASLAQRPRPQPQEPPHQPLKWKGLQLL
SQWAQRRCLRMESPMQQSSAGAACRSWSLLLPT,;
CCDS31863.1, Ins, C_7,
(SEQIDNO: 3903)
GRGQQRRRWEAPRGGSGHPGGRRCQRAQQQPPGRRAGRTCRPRSRGRELR
GRLRHADAGGPRPAAVGGRAPSRLCLGCTAAPA,;
CCDS46741.1, Del, C_7,
(SEQIDNO: 3904)
LTVLQNHPSLPRPIPAPPTLCPQTRWPHLRGHQGILAASHILETALAAIF
QGGAALLVLLALPCRDPQTRQPQIQFLSPAQEL,;
CCDS33592.1, Ins, C_7,
(SEQIDNO: 3905)
NPGCTLWPHQGPCQRPQTGSSSLPTQWGKSHSIPKFKIRKIPDCFSRSRT
FLDRVYSPFRSDPAKIGRGTTRFYFKEILPPDD,;
CCDS55892.1, Ins, C_7,
(SEQIDNO: 3906)
PGGRSSHQASSPSPTATAKPAAGERRPSAAWQQPPGQEQEPGTPRRQGGR
EACVLPSLRSRGPEAAWGPPLLDFRPALPRAPP,;
CCDS45544.1, Ins, C_7,
(SEQIDNO: 3909)
PLPPHPLPARASQGLPFSRRWAGSRGCLPVPGGDPIPPRGPRGGSGRAAG
LPPCAASVPHTPLLPQQRQPGPAGRAADLQAV,;
CCDS30652.1, Del, C_7,
(SEQIDNO: 3910)
PPGPCFPPGPLPAHLTRPSPPTPSPRTHAHPHAGTPAPGAHQSLPRGTTR
CPHGQPVLSHRPAAPHRSETAAAPDAAGTTGG,;
CCDS2446.1, Ins, C_7,
(SEQIDNO: 3911)
QPEEPAQYGTALTHPHARDLLHSLLPAQVQEQPLPGGQGSSFIHRGLWHP
HLHPGDGPGGLLHHRHLHAEADSAYRALSDLSR,;
CCDS45960.1, Ins, C_7,
(SEQIDNO: 3913)
SHAAAQWASPVHGAVAARPADPGPEEARHPGRLTPGRPPAWGPASQPPPR
GAACRRGPAPGAAAPAREATTPAAIRAWPCWG,;
CCDS44299.1, Del, C_7,
(SEQIDNO: 3915)
AMEAPRGTCSPAPRACLWASLVKGTLSPKPSRMLGSCCTATVGPWMAPPT
PPSVRTSSAWTHPQPRSGWRTAVCTHWRKPC,;
CCDS46579.1, Del, C_7,
(SEQIDNO: 3916)
GGGTIQPQATGLLKPKISQNMIPQMARVTGVSGLSAASPAGTATRNGPGL
VATRALQQNRGPVTVQTAQELKTLLGQLPPK,;
CCDS8078.1, Ins, C_7,
(SEQIDNO: 3917)
HGRRGLLHHLSPGHGPHHPPVTPQTRSPAQPQDRWGHGRPWGAVCPLRPG
PQPAGGQNEPPRPASALAGEPALGARGPHVL,;
CCDS13819.1, Ins, C_7,
(SEQIDNO: 3918)
PVHRGARGPGPAHGLRRLQRAVRALQPAQHRQDRRRAEPLLQQAAVRPAG
RAPAHQPGQGLHQLLRHERGQCGLEQLHLRL,;
CCDS31269.1, Del, C_7,
(SEQIDNO: 3919)
AESEPHRPWDASSSSTPPSKPTVMKVTSSIQSGWRRVQQGGWASACAGAQ
SMAWASSSAKWRKAAVQSGLACAWGTRSRR,;
CCDS32758.1, Ins, C_7,
(SEQIDNO: 3923)
QRNDAGPQRGCDGQRDWGQDEDSQEQEQERTHRDRDEQIHGERHAGGEDQ
VRRGGRGGGSLPQPQEAGSRRAPPSCRQDF,;
CCDS58876.1, Del, C_7,
(SEQIDNO: 3924)
SLMTSTFTSSHFKWILLLTILLRGARPVCHLQARGPAPALPSQFSSTPGS
SSQTVARHQLFVVMMKMLHHCQPNLLIFIH,;
CCDS32510.1, Del, C_7,
(SEQIDNO: 3925)
ASRRPSWPAAPPAPPGPHSAPRPPLPVAAASAPARPPPPDATRPGHRPAG
DCGCRWTRFPAPVPPRPQTSQPALLRARR,;
CCDS12652.2, Del, C_7,
(SEQIDNO: 3926)
CSPPSPQNRSRTNGSVITSATEAWCRTTLPASQRSSACTRSTLMSCTEAS
RDPAKMRRRSWQRRRLPSVIPTRTARWPR,;
CCDS42417.1, Del, C_7,
(SEQIDNO: 3927)
GSRAWTRGAARLPSPSSPTSRWTAGCRRRTRSGAVARRAARPSRAPAAPA
ARGLGSACSPLPSGAAASRSPRRARRLRG,;
CCDS7532.1, Del, C_7,
(SEQIDNO: 3928)
GWLRPPCPPGPCPALMPRPPPPPRLPPLPPTSIGTRVTRAWPACGSKPNS
TPPSATPLCTGRPRQPTLVRASTPWKGPY,;
CCDS11098.1, Del, C_7,
(SEQIDNO: 3929)
PGVRRTSRCWQSKSWALSNGSTSGMVTDSSTGMTPRKMSLFTRQLLKETT
PGSFCAALEMGRLWNLMSWKERRAQKPLM,;
CCDS12922.1, Ins, C_7,
(SEQIDNO: 3930)
PRPLGPSAGLALGPALWAALRGACGPSSPGPSPTSYPSPCWDPRPHPDPE
AGPRLRPLLPTQAPTAGGQPRLHRPGCRR,;
CCDS12013.1, Del, C_7,
(SEQIDNO: 3931)
RAGRPSSTTASRAGRPSPRPAPCRSMSARTPARSRSAAPSAAGPSPLRAT
SRCTWGHTCGITPPRDAAAACLWRTPWLS,;
CCDS53685.1, Del, C_7,
(SEQIDNO: 3932)
RTTMRPSLASTILQASSTMRPKASWRRTETPCMGTLSSWSTPPGTSSSSR
SSRPMSPWAPRPGSARPHLAASSSGHWSC,;
CCDS4404.1, Del, C_7,
(SEQIDNO: 3933)
SPPTWRPWGSLCLCRPSTLGCPSSGSTTTWTCVGTSPPWAASPTPPLRLA
QPFPRRCPCTTCPTIRCTRSCPLVCHILT,;
CCDS53377.1, Ins, C_7,
(SEQIDNO: 3934)
AAGPAAAARGAPGRPDGGPRSADAPAPHRPQRGERRQALRSLQRGRAAPE
GQQQHHGVCSRAHLRARGRDRGQARLQD,;
CCDS41580.1, Del, C_7,
(SEQIDNO: 3935)
ALWMARRGHTRWPAAPRATPSPWSPSPRAVMGALPSTAAPRSRAGRQRSG
PATWRCCGGHSPCPLVAPARTGCPRVNC,;
CCDS44254.1, Del, C_7,
(SEQIDNO: 3936)
CMSSSGCALDSCFPSSSSSASTLPELTLITWDESGCRRGPLSRLRVSGWK
TRAGTSAACSSWTSTSLKTILLTAPGCI,;
CCDS43002.1, Ins, C_7,
(SEQIDNO: 3938)
LSCALRVLQAWLEPLAGDHHLQQVPGKIHLHHAARCHPLRIPGQWESLRV
EEEHLNCSQHHRGQALDRPVRGHRDCEP,;
CCDS41800.1, Ins, C_7,
(SEQIDNO: 3939)
PAPTSSSSPSGGGRRAGEHLPHLSGGDPECQDIGEVPAFILRGLHHPGSA
GEKGLPHVRPLLWAAGGQPAPEWADAGL,;
CCDS54831.1, Ins, C_7,
(SEQIDNO: 3940)
RGLHHQRAQLPAQHGDRRTAGERGVGAAAAPRGRRRAGSPAGTLRALCAG
GSQLRLPGVRAAAVPARRCHSGPAPATR,;
CCDS13952.2, Del, C_7,
(SEQIDNO: 3941)
RSPAPAPPLQPRPCPLALAALGPPKPCPDVWLAAASEPPQCHPRYPPHPL
SLPGAKAGVHQPPPARPPQVQPPPAQSL,;
CCDS58874.1, Del, C_7,
(SEQIDNO: 3942)
SLMTSTFTSSHFKWILLLTILLRGARPVCHLQARGPAPALPSQFSSTPGS
SSQTVARHQLLMMKMLHHCQPNLLIFIH,;
CCDS4739.1, Del, C_7,
(SEQIDNO: 3943)
TTPLPALLPGHPHPAALPCPACHPTLTCRRLASRAHFPRRRPLPPPRPRR
RQPRLPRPLASWCPRTRGLWARCRWGAT,;
CCDS11563.1, Del, C_7,
(SEQIDNO: 3944)
ARQPSRPTGRTPTTRLMAPVGSVMSCSLLTQPSPASACTMPPLLHPQWAP
HSAGLSPGACRPACTCISMTTISRATW,;
CCDS13949.1, Ins, C_7,
(SEQIDNO: 3946)
PEDGISPCTLPGSTGHLPHHQERHLPAPAQPGRLRQPRGWQAQLRQQPHQ
LHGRPLQLRPGLWVLHHLPPAPLGKAA,;
CCDS2405.1, Ins, C_7,
(SEQIDNO: 3947)
QPPGLRAGQGAGLRLLHDLRPGRGAVVRRLHRALRPGAALPPPAGRGEAA
ARPAARPRGLPQRKELPRASQDRERLP,;
CCDS45864.1, Ins, C_7,
(SEQIDNO: 3949)
TAEWQQRQLSGHAGHGHLGGQHLRFLQWCHLGPAAGKAGLHPVPPQSPTH
AQAAPATHRPRRVWQREAGRWGWHQPE,;
CCDS9607.1, Del, C_7,
(SEQIDNO: 3951)
TSRCPMTLLSTLTRKILNVKRSQGSSPPTVVACPRSSSTAPPMWPPSSTV
WLSRPSGSRAPAKPRSTRCCWCSLTVW,;
CCDS6982.1, Del, C_7,
(SEQIDNO: 3952)
AWSALRVPREKRAQWVSVATLGPLDPPVNRGFRALLEKKGRRVTQALQAS
LGKMALQDYVVSLGTEGFLVQWELLD,;
CCDS30652.1, Del, C_7,
(SEQIDNO: 3953)
GLRVTPSTPCGALIGQRSCVAGGKPDGDARQTPDPRAAYCPCLCPRGWWL
PWPNPHHHRLLHPLPCQAQARSQSQS,;
CCDS12065.1, Del, C_7,
(SEQIDNO: 3955)
HPHRSPPTSCPPLLEAFPLPRASLRATVPRHSSVLATGLHLHRQISLPLR
GFLLHQPLPGQHLWLSHRLRLRLPRT,;
CCDS45544.1, Del, C_7,
(SEQIDNO: 3958)
TPSPPTTSQSQPRPSLFPQMGWEPRVPSSAWRRPHSPTRAPRWVGEGCRA
SPVRRLRTPHTTSPSAAPAWTSWTCC,;
CCDS7013.1, Del, C_7,
(SEQIDNO: 3960)
APWSCYSPASPRPSWGPSWKPSTCAPPAETSSAGPSRRSVATGTAPSAWP
ASSALGLRTVLPVFTRAYMKKAFLF,;
CCDS41858.2, Ins, C_7,
(SEQIDNO: 3961)
PGGRSSHQASSPSPTATAKPAAGERRPSAAWQQPPGQEQEPGTPRRQGGL
RSRGPEAAWGPPLLDFRPALPRAPP,;
CCDS11367.1, Ins, C_7,
(SEQIDNO: 3962)
RGLRGAGARAGLRLLRHLRPGLGDALRGVHPPLRLGPALLPAPRGGEAPA
HTDARARRVHGAGGDRGHPGKPAAL,;
CCDS7957.1, Ins, C_7,
(SEQIDNO: 3964)
GAPGPRPARAPRGRLPGVSARGTHAAGQPRPRQQLLQPPVRGGRGRGAPS
RSLHPLPRSACRRLAGAPGRGRAY,;
CCDS55351.1, Del, C_7,
(SEQIDNO: 3965)
GGIVPTRVPRSHLCLSHPLPKQRDPDRQPRKKRRNLRRVNPGSFVGYLER
KRQKLICQMTRTNRLFGMKRKTSG,;
CCDS43537.1, Ins, C_7,
(SEQIDNO: 3966)
GTHAEHLQRHQGDSEPPGHRAGRHPQLLPRLPALHAAGHARGAQARHPPQ
RRLRREQEEPEPGEADADPLGGPV,;
CCDS14081.1, Del, C_7,
(SEQIDNO: 3967)
RQTSFCTLTWQPPRQVCLGFSKSTAPGGTTRGRMCSRGQACWHTHTSSWR
RPLGSWPSTGTHTGSWPASWGPQV,;
CCDS9266.1, Del, C_7,
(SEQIDNO: 3968)
RWLPGGGSPWTSRRGPPWSSTTPCTQGVREGTASGKTRGEAMGSGQATVT
SMSPGPPCRGSGASSFIRHTGNPP,;
CCDS59054.1, Del, C_7,
(SEQIDNO: 3969)
SMVIRMSGCSSSSELTQTRGPRRPPGHQCYLSPHETWKVPRMQPGSRMQR
LLKVLRTPQAQKNLYLHQHQQSSN,;
CCDS47213.1, Ins, C_7,
(SEQIDNO: 3974)
PAAAPAAARGCPRPLRLERGHRPRPASRLLGHRALPVLSRHGPHLLRGGD
RPPARPEEIQDVLALLVPGTQAF,;
CCDS7922.1, Ins, C_7,
(SEQIDNO: 3975)
PAQPAVWSLAAAPPGEESRAGAHSHCTQGDCCLLTGPRSFIHRGHLPEVG
QHPSGPGSAAEVQHGAACGFRPVQ,;
CCDS44659.1, Del, C_7,
(SEQIDNO: 3978)
AQMPPPMPALGSSGPHPPVPPTHPNMEGLCLPRACLSGACRTLPETLRTA
PRKSSLMPTKASRTVRRSSPRR,;
CCDS44904.1, Ins, C_7,
(SEQIDNO: 3979)
EGRDHPVPAQAVQLSGHLCRWSGLYHSRTVCHSTARFDQAAPVGNATVSF
SHDAWQHRIQCRFGCICSDYFS,;
CCDS45510.1, Del, C_7,
(SEQIDNO: 3980)
HCLWLWCRPSWKGKGASAPRGPGMPNSLNQGIPGRYLTGGLWAWKAGTGA
QRVCCLRCCFSPLKKVWNLQGL,;
CCDS9577.1, Ins, C_7,
(SEQIDNO: 3981)
PLSPAPPAHARHRARLPRLGPKQQLQPRSLATAIWLPASRGPTYPHTALT
PVTLSGHRCHAEVLRLASNRQS,;
CCDS941.1, Ins, C_7,
(SEQIDNO: 3982)
PRASIRISHGSPRSYASAWYAWTSSTDAPPWIHWPSTTPTLWLPAGASPS
TQTHSPATSSPSRPTSRPSPSV,;
CCDS45890.1, Ins, C_7,
(SEQIDNO: 3983)
QAALGPRGGRGTGRAGPLHVGTEPGLCGPPPDPTEPPAACQAGSREQEPA
EGSHPARDPDRECRGLAVRGGH,;
CCDS276.1, Del, C_7,
(SEQIDNO: 3984)
RRPLRSWTPRTRGAHHCLWPHCLPGPHLKTSLPLTCLQTPVPDPALPGQT
LPPLALSPCPSPRNPQPYSQQG,;
CCDS34625.1, Ins, C_7,
(SEQIDNO: 3985)
SSAGHKLVNREPGSWAACTCGVPAPPGGGWAKEGASEPSMDACLCLPAPY
APHTPQHWPLRGSGDTGRGSRL,;
CCDS31621.1, Ins, C_7,
(SEQIDNO: 3986)
LPGEDPGHGLPGRLRPAHGLHPPGRQEIQVCLPQLGLAGGGQGRPSHTWP
RALPPRLASQGCPVDAPDCVL,;
CCDS1646.1, Ins, C_7,
(SEQIDNO: 3987)
LPRLCEVQKHQRRLPVSLRGPLRVRRRWENLRRLREAPSGDLDLHVAGCS
ADRRLRRSHLDGDLQVDTHWH,;
CCDS43446.1, Del, C_7,
(SEQIDNO: 3988)
PGLAAPIAWATGPTCVMWPCGPSRSLASSLGSTPNCMPSPGVMTGGSAWK
TTAAKVLWSIMSDSQEVTGWN,;
CCDS32513.1, Del, C_7,
(SEQIDNO: 3989)
PRPSVPLTAPPRTLWHKLRPQTVPAPRTTLRPPVPPPQPKALLAASSRKP
QNQNPRPKPRRPPEWRRSLSA,;
CCDS12328.1, Ins, C_7,
(SEQIDNO: 3990)
PSAPRPAATPAAACQASASHPAPPFTPAPQVGPLLNRSPPRSPLPAYDTF
PPDVTVPEPDPPVSTPAKRPA,;
CCDS12136.1, Ins, C_7,
(SEQIDNO: 3991)
TALPTASSLSTVTALPAVPSLPYGLTRTPSEPRAATPHYPPRTDGTAGAE
QPHVEPERVPGARGQDAGGRM,;
CCDS42402.1, Del, C_7,
(SEQIDNO: 3992)
AATHQPWQGRCSGPLRGELMPGGSCWRLGGLCTAKWPGQYGPTWASCPLA
QQCLAHTQFLRALGSPWGRD,;
CCDS984.1, Ins, C_7,
(SEQIDNO: 3994)
CPAHSSPLGRSLQVLRGSREAPPVPGPARGLPGPRPEKGGRREAPVVPEA
SPRRALLPPGRPERRPFQLL,;
CCDS4267.1, Del, C_7,
(SEQIDNO: 3996)
NTPASSYLTAASPSRPPARPRSCRTHPSTVTMTVAWRSLRRRPASHPQGL
DSVPWPCLRITMSAPPLMAA,;
CCDS55185.1, Ins, C_7,
(SEQIDNO: 3997)
PAVRALQLRGHPGRDPALRVRASQYLRHLRPDRAHRGFGAAEPDPGARHL
HRGLVCEQPGVDAEPLRTGA,;
CCDS7537.1, Del, C_7,
(SEQIDNO: 3998)
PSLRSFPRDCTPSTESAAAFTLTSRTRSRLPLSSSTGWVAQTPWTMLACT
GMWGALLLTSPSTGTTSASA,;
CCDS45960.1, Del, C_7,
(SEQIDNO: 3999)
PVASANGAAVGVAGAPCLTSIQARPLPTSPAACRLASSRATSVRQSALPR
WGPEKGSWASAPGLMVTATC,;
CCDS2773.1, Ins, C_7,
(SEQIDNO: 4000)
RAFRPCRGAWKAWYSRAPRQGWGCGRGRKARREGRTGRERRTWRTGQRWP
SWTPWNPWAPRTPWPQGVCG,;
CCDS14374.1, Del, C_7,
(SEQIDNO: 4002)
APPALVAPRGLLCPALHLVKPRVLHQNLDPTSSSFSKWCRPWLEQMLHSC
RIQKSDFSNNWNSSTQWGS,;
CCDS33428.1, Ins, C_7,
(SEQIDNO: 4003)
HLLPSPARGDRRGQRHLHLQLLQHIGELRAKLVPHEPQQPDGQAGRLPRG
PQPARPGLPLPCHTTAQRA,;
CCDS59192.1, Ins, C_7,
(SEQIDNO: 4006)
PTISSSTTGARSFLSWTRTWGLPQCLWNAFLPKSAGVSVSTYHSAYAATA
ASSQEREKNYKNSGSKPGR,;
CCDS46614.1, Del, C_7,
(SEQIDNO: 4007)
RCGRPALTPRRCLPPHPRPACLATSTRPWSSWGPASRARGETRLQNPSCW
FRPLGPSRWCLPFPSAASQ,;
CCDS2615.1, Ins, C_7,
(SEQIDNO: 4008)
RYLPPQLPCAEEGAEAPSDPDRRNHNGGEAGCGARLGHQRGGWLPPLLQR
PWRGLLCLCGHHARHQVSV,;
CCDS4457.1, Del, C_7,
(SEQIDNO: 4009)
RYMRRRPPPPASTRVTAARPSPARPTGCPCLSASSGTGGPGHPARCLPSV
VSGGGSSKTSCHSAVTGGR,;
CCDS8260.1, Del, C_7,
(SEQIDNO: 4010)
SQVRQKHLDGAVLSRDRQSVKIADLSLPPSPDATPSLQWTTADFTELLPV
RPTSTHSVVERVQAGLLNP,;
CCDS34342.1, Ins, C_7,
(SEQIDNO: 4011)
TSPAEPVRPHFQFSAEHRPHRLSSGHPRPPPPPPDDDPTHAHPGAPLPGR
HAIRRLRQPLCPSGGHQES,;
CCDS12196.1, Ins, C_7,
(SEQIDNO: 4015)
RLPLLAGHGDLQRCRRMPVQPVCEWRLSEPGRLLHLQMWPWQPAGPLWYL
LSRQHQGHLLAEDPGEPL,;
CCDS47428.1, Del, C_7,
(SEQIDNO: 4016)
AQRTQRLQHLWTGGTPARWKSCGTSWQPISVAPGERTDSSVTGQAQQWPL
RARRARRAPACLRRRLS,;
CCDS53997.1, Del, C_7,
(SEQIDNO: 4017)
ASPLKRDPQQGQFIPSQPPTLPWTLRKQPQGPSCSRGSQRAVRGTSPSQG
ILGSTGCSLGSRLHSWC,;
CCDS13243.1, Del, C_7,
(SEQIDNO: 4018)
LRGHAQMCRSHGTKGLTCGGMSSCKRQGMSVSPSGVMPRTHSSSCTPVAP
QANPRVWFTQLGATCSM,;
CCDS31473.1, Ins, C_7,
(SEQIDNO: 4019)
PASRCHPCGPAVHGPAADVGSPVQALAWPHEPGLVPDRRRSSAVPAFRRG
LTSACCPAGRGLPCGVP,;
CCDS2754.1, Ins, C_7,
(SEQIDNO: 4020)
PTHPALPRSRSRPSASPLRGSAFPQPWAPSASPSPTGIWSCPFYQTHGPP
GSPSYHSRALVCWPVHP,;
CCDS44581.1, Del, C_7,
(SEQIDNO: 4021)
QRCHRHRAPWLIRTLPMSPAQAVPPRTPRNAQPQSCPPQRPPRPPCPPLP
CSRGPSTQPPDGPRSRL,;
CCDS13495.1, Del, C_7,
(SEQIDNO: 4022)
SVRSTRKVSTMTSCSMAPSTPSSSSGAKAWRRSPEAPSPWSCSNIMKPTP
GPTPPAASTTSSSGSCG,;
CCDS42217.1, Ins, C_7,
(SEQIDNO: 4023)
TPAGSRCQVGAGFACSPGVQPGGSKPQGEAREALSYDPVPGAAAGGGVGG
RHPPALHLTLEIPCGHG,;
CCDS9577.1, Del, C_7,
(SEQIDNO: 4024)
VVSCSPCSRSAPRSPPSARPKAAASAPKPGYSNMATCLPGTYVPTHSAHP
SHSQRPSLPCRSFTACK,;
CCDS9629.1, Del, C_7,
(SEQIDNO: 4025)
WARGDWGKNWTQRMPRHAAVWPWESPLPMALHLSVFPDLHPLGLACIRHR
RDQPPHLAPGRASPPGR,;
CCDS11409.1, Ins, C_7,
(SEQIDNO: 4029)
QPQPPPAPPAAVAATGGAGRGEGAGPRQPGRGPPGRCGHREVPHPQGLSP
GSADGGFCALPLQRHF,;
CCDS13819.1, Del, C_7,
(SEQIDNO: 4032)
STSRCTWSRTSSWPSAAPASRARSAACTASARSAARRTAPTASCCAACWP
SACASARTGSTSTITT,;
CCDS12584.1, Del, C_7,
(SEQIDNO: 4033)
TRLTFRERTSTSPATRPLTHPRSILGVSMGYRSNTHKFSLSPKSRQIITG
PMPVLSLTWLLAAIIP,;
CCDS6882.1, Del, C_7,
(SEQIDNO: 4034)
TTAASGPASSACPTTTTSPRGRTNVSPTSRMSTVARATTTASSPRKGSSH
RGPSCMASPSPTPPGP,;
CCDS41266.1, Ins, C_7,
(SEQIDNO: 4035)
TVALLQAGPVAAVLFNFPPAQNLAARPPGEQQLNGNDVEGVSSALRFGKR
VALGPGRRSQHRPARR,;
CCDS46224.1, Ins, C_7,
(SEQIDNO: 4037)
ASSTECWQRSPDPHAAPTRCQDAQRNGSLEPAEQACPAWDLTDQAPTSAP
TAAQPPPAEEACAGG,;
CCDS45660.1, Ins, C_7,
(SEQIDNO: 4038)
HAVCGRCGVPAGVPDPGGRGRRGQRGPALLQRGAGAHVRAAAHGDRGPES
GGAQRAPEGGRRPQA,;
CCDS9256.1, Ins, C_7,
(SEQIDNO: 4039)
HRLRPKRRAAQPGPRKAAQGPRRGGTSDPPRHPAAGPARGEDPGGRPGER
RQGGEEALRDGQNCV,;
CCDS56148.1, Del, C_7,
(SEQIDNO: 4040)
LLRILRLRRHLPPAAGLPVTGSPRSFTDTITYRDSRFLRPSKRPSWYNIL
TVNRPVVILARTQTT,;
CCDS6879.1, Del, C_7,
(SEQIDNO: 4041)
LTCGVLGASWQRCGPAAPSCRATRSSTNSPSSVSSAAPSPLRCGQTWTTM
SCTKSWSWSRARSGR,;
CCDS9835.1, Ins, C_7,
(SEQIDNO: 4042)
PAVGLVCWERLVRGGSGTLPGSVGPQLLPGAGEAGGRRVRVPQRGGAHVQ
PILCLPAALHRLLRR,;
CCDS41411.1, Del, C_7,
(SEQIDNO: 4045)
RGRRAAPRHLLGKSPPSRNSGPEAGPQPRQSRLETPQLAGLWSRPGPHPR
LSLPEGRRTDLDCSP,;
CCDS9999.1, Ins, C_7,
(SEQIDNO: 4047)
RLEGQHLRRRQEQQLPAQPLCEWWHLRGQRGLLLLHLPGRLGGSYLHSQY
QRLQPSALLQWWHLC,;
CCDS42560.1, Del, C_7,
(SEQIDNO: 4048)
SAAAPPLRATLRFYRSRGFRNPQSPWQGQGAWGGAAAATRITGAPGHPRP
SPCPPASCASPRPAR,;
CCDS55640.1, Ins, C_7,
(SEQIDNO: 4049)
SPWCHLGPGQQARLGLHRPSSPQCHLGLRLCIRLSFYSGAQRHLCQGYHN
PSQQEHSILNSQPPL,;
CCDS41247.1, Del, C_7,
(SEQIDNO: 4050)
TRPRTPERSASGVRWRPCGTWAWPSSPVPSPRSSPQCPSSSASSPHLPSS
ARLWHSTRACPSSTR,;
CCDS32782.1, Del, C_7,
(SEQIDNO: 4052)
ALLAHQERWCPWPCRMSQPQHRRTMAARLTGRTSQTNATIFQLRKKFLRM
QSFSVKTSLHILFS,;
CCDS3352.1, Del, C_7,
(SEQIDNO: 4053)
CQLLGALTTSTGTKWMTQTSSRSEVTPSLVAVRPSPQKALRPGWASQRLN
SCMLGLPRRSQVPV,;
CCDS46076.1, Del, C_7,
(SEQIDNO: 4055)
EASSCMAHLAVGRPCWQRRWHITQQLHSSGSWARSLYRSIWVRAPAWSGM
CSAWPRRMHLPSSS,;
CCDS12022.1, Ins, C_7,
(SEQIDNO: 4057)
PDPGRARRQPLPGQWRGPGAAAAAGPGPGRRPPAAAQLPAGRPPSQPGAA
ARRRGGARARGHAL,;
CCDS47048.1, Ins, C_7,
(SEQIDNO: 4058)
RARPGRRRRFVVVAVLHARHIPGPLEDSGAAAARVPRRLLVVFVRRCRQV
WPRRGGGRRHRRHG,;
CCDS1053.1, Del, C_7,
(SEQIDNO: 4060)
TLWTLCSSTPTCLRTCHLMPGPDSSGSRSLWPPQRPSNSRKFGWQMRAST
PAPCLTHCTFWTRL,;
CCDS55444.1, Del, C_7,
(SEQIDNO: 4061)
ALLHPREPWTCLIPLLAWKKTLESWMEPLSCWGWGGCSIKPPLPRRWTTV
LREPWHGMQEIRP,;
CCDS6714.1, Del, C_7,
(SEQIDNO: 4062)
EKACGHPPTDRAETLLKFLLKGILALAIGPAGALAGPVLTTLGTQRPLPW
AAPCPATASPSPL,;
CCDS2800.1, Del, C_7,
(SEQIDNO: 4064)
LHMQPSLPWQGLKDLGSLVSLCCTGVSPALPQTCHCKRRSSGRPAVVASR
SGTPCHACGMPVS,;
CCDS12022.1, Del, C_7,
(SEQIDNO: 4065)
RPRARPQAASPGSMARAWRSGCSGTWPWTAASSGCSAPCGPTPVTAWRCR
QAAWRSTGPRSRS,;
CCDS44903.1, Ins, C_7,
(SEQIDNO: 4066)
EGRDHPVPAQAVQLSGHLCRWSGLYHSRTVCHSTARFDQAAPVGNATVSF
SHDAWQHRIQWH,;
CCDS10283.1, Del, C_7,
(SEQIDNO: 4067)
FALRPSTVPFLTRAVPMKPSGRCLLSSPRMTSSRCWTHCLSTRACSPTSL
TSSIYKKAPSPR,;
CCDS6916.1, Del, C_7,
(SEQIDNO: 4068)
PVGPAKLGCSMTTRQPTAVSWPCWLMSSSLSTACLAWTLTGSLAREATRR
ARSLSPTWNCSA,;
CCDS47428.1, Ins, C_7,
(SEQIDNO: 4069)
QPREHSVFSTCGLEGPQPDGKAAERAGSLSLWLQERGPIPQSQARPNSGP
SEQGGQEGPPPA,;
CCDS30880.1, Del, C_7,
(SEQIDNO: 4070)
RPTPPPSSTLPPGKAASSISMTTCLATLQVPQLQVGLAEAAGTDRPAPWC
TGGTATPSRRSP,;
CCDS54978.1, Del, C_7,
(SEQIDNO: 4071)
APAAWETHQNEVPSAPLCQSRSCCVPCASAPHTLPPAFCWLLTLGAAQLN
VVAPGGLPQVW,;
CCDS3883.1, Del, C_7,
(SEQIDNO: 4072)
CWSPLQPRARQRQTRCQVRPPPGPPCLPLARPPRPAPARPAGGPPARTPR
GPSEKRSRSPR,;
CCDS58443.1, Del, C_7,
(SEQIDNO: 4074)
KARCPRVGCLHSQLPHPHPTPTSDTPKVSSLARRLDFQEEPMTGFFNLIP
PSSSPSTPRGT,;
CCDS30625.1, Ins, C_7,
(SEQIDNO: 4075)
PGGDTSPGVHPGFPGPDSDLHLRGHWRPHPHHQLEAQLGPHPLSSQGDSD
QRGWPWHTDHP,;
CCDS6575.1, Ins, C_7,
(SEQIDNO: 4076)
PSPGPGLWGIHGAASGCSRAGCFRARAAALEACDSAGEGWGRRSKDQDCP
HSLLRPPHFSS,;
CCDS14033.1, Del, C_7,
(SEQIDNO: 4077)
RGAALAISMGVRVMWASFKHSTLALAVCHIISRITLGLSLQGVLSTNSRL
PASSSSSKSSS,;
CCDS6357.1, Ins, C_7,
(SEQIDNO: 4078)
RLALQPAAPACRSGGRRRLRERAGAQPHRRLPAAAPSRARACVPGAVHPH
WTRAALQGVSH,;
CCDS9121.1, Del, C_7,
(SEQIDNO: 4079)
SPAVSGDSQTPFCLPLRMKLAAWSTWRIRRGRLCWRKLLHLQRCTGRPDS
PSKVPDSVRRM,;
CCDS13464.1, Del, C_7,
(SEQIDNO: 4081)
AVTRASAPRATAAAGAWRGRRPPTARSSATTRGPPSSTSRAVGRPPCWRG
PGSTTHTSRP,;
CCDS5715.1, Del, C_7,
(SEQIDNO: 4082)
GCFWPCLWNSLLRFCPASCSGCYSWTIPPTGSPFSCTTTRSSMNPTSLTP
GRSSRTTSQL,;
CCDS47339.1, Ins, C_7,
(SEQIDNO: 4083)
PETDGRPPAPTSRPESLATAPTPDQPRRTQQKQKPQNGKAPCSFNRQKHE
TSPRSFISSV,;
CCDS44755.1, Ins, C_7,
(SEQIDNO: 4085)
PRPPGAFRVLEEGRCKTQGRGRKDHDPWREADDVTYTQERCRHVCVRSLQ
HGGRTGECGS,;
CCDS54719.1, Ins, C_7,
(SEQIDNO: 4086)
RGPSDLQREGMHVPEVFPARIGGQQRAPVPGPPKLWGLRHRNQEWPGPGS
LGQALALGLF,;
CCDS3355.1, Ins, C_7,
(SEQIDNO: 4087)
RRGGGEEVPGAAGAGRAEALLPWLPPAMDRHQDRGTHALAHPQRPQPDPP
GAQAVSPDLR,;
CCDS1862.1, Del, C_7,
(SEQIDNO: 4088)
SLLCNPPLLPPSPRSSPSHASSAARRSNFRATWWCTGAATRARSPTSATC
ATTRAPRPAS,;
CCDS13442.1, Ins, C_7,
(SEQIDNO: 4090)
SVLAVSERGGRNDPAGCPADHPRADGRSHSAPDSHPHGLRWPPGRLWQSN
FHYQFGYYLH,;
CCDS6940.1, Ins, C_7,
(SEQIDNO: 4091)
GVREAHGAPCDILCNFIHLSSTTSSHQHFLNCRFWQSASHQCRILWGHQF
WWDISKCWQD,;
CCDS5700.1, Ins, C_7,
(SEQIDNO: 4092)
HEERSQLSADGPGRREQRPRPSSRELCGSPPAQPGPDPHQPKQEEVPLST
CAGCCVPGL,;
CCDS5280.1, Ins, C_7,
(SEQIDNO: 4093)
PAALDPRELAVLGLAGALPFLPVPGQHDQERVFPDAGQLHPRLLCGLRGS
SMDDWCDGN,;
CCDS7916.1, Ins, C_7,
(SEQIDNO: 4094)
PERPRPFIHRSRHLHRQPLPPQHSHPDGTSGWSPCCPAWGSGPLASRPNP
LPGRCATRGH,;
CCDS12326.1, Ins, C_7,
(SEQIDNO: 4095)
RSPRPGASALSSRGLPPWPQSGTVGVQEEQEAPREGGAGAAGAPGAGQEA
DAGLPGPPG,;
CCDS10206.1, Del, C_7,
(SEQIDNO: 4097)
APQLPMNWSPLCTPIPRTGPRHPQTWRTGLKCTALWVAVFLKAGVTPKER
SPGLNQAG,;
CCDS32853.1, Ins, C_7,
(SEQIDNO: 4098)
CCWPIPHDSGLQPSACGPEQPHPAAPSTSARLSFSRGSTSSVCESSCVAL
ESASRTCQ,;
CCDS35317.1, Del, C_7,
(SEQIDNO: 4099)
CGPLTPFPVPRPSSPPPKKTCSKATFGTSLSPFATPTRSGTCCWAWTAPT
AWTVAWTP,;
CCDS58453.1, Ins, C_7,
(SEQIDNO: 4101)
PGPPGAELPGGALPISPAHLSPPGGYPPGGQLLGVGLERTPGPSPCGCCC
LHLDTTNL,;
CCDS13060.1, Ins, C_7,
(SEQIDNO: 4103)
RQAAAAPQGPCCGHFPAIRGWLQHLWGLFPTHEGHQSPQLAACGDSQPFA
GRGGLVPL,;
CCDS12481.1, Del, C_7,
(SEQIDNO: 4104)
ADFTEPGQAISPHPTLELSPATSNPHPLGPQIWPPGLPPSHMLPSPHLAT
RVSRLTC,;
CCDS8992.2, Ins, C_7,
(SEQIDNO: 4105)
QGLTHLEEILLPRRKPHAALQHGRAVHHQGDQPDKHFTEPDPTVQCENFP
HQNATGT,;
CCDS10440.2, Ins, C_7,
(SEQIDNO: 4106)
RAPRRAAGAVPAAGQPPGPAPLPPVQRAAAEQEAQEGSSERCGERQRRWL
GAPRKRS,;
CCDS8078.1, Del, C_7,
(SEQIDNO: 4107)
RTTRTFTPPFPWSRTAPPSCHPANPLPGPTSGQMGPRAPLGCCLPPPPRP
PTCRRAK,;
CCDS276.1, Del, C_7,
(SEQIDNO: 4110)
PERKTATVRPKQRTRTMRLGPTQPRPALLKLGVPSMETHEILQPPPHSAA
HGPPLAL,;
CCDS58150.1, Ins, C_7,
(SEQIDNO: 4111)
PRSCRRRPSCHRCTAWCCQSGTCSGRSRPSWPSCPIPRRDPRPGHRSASP
GPKPSL,;
CCDS8930.1, Del, C_7,
(SEQIDNO: 4112)
QGEESLRGLGLGGWQQVGLGVVQTDWSQRWYAWWWKVWRGSSGASQGGML
GRSHPC,;
CCDS9274.1, Del, C_7,
(SEQIDNO: 4113)
RAPAPGCSQRAPLALPALLPATWCLGPAARPQPLSSLLQDTAAALPTPLL
RTWRGL,;
CCDS46529.1, Del, C_7,
(SEQIDNO: 4114)
RGCFATSLRPSPTCFLTDPRCWYFPPPPCIAPPTPTSPRLPLWRSRSFPC
WKTCLT,;
CCDS41281.1, Del, C_7,
(SEQIDNO: 4115)
RPWRFTGWSTGRRRSRRRSGSTACAWAPLCGGGPSAAAKKSMSSAPRTTP
WQQPWL,;
CCDS35172.1, Del, C_7,
(SEQIDNO: 4116)
WASMASSRSPPTPQETWLPSPSTSAPSAGTAPQASTMECTAARGARASSS
GRCART,;
CCDS47213.1, Del, C_7,
(SEQIDNO: 4118)
CRRPRRRPGLPAAATPRAGPPAASGIAATRTPSATCTVAPWTAPPTRWRP
ATGPA,;
CCDS34579.1, Ins, C_7,
(SEQIDNO: 4119)
EPCGEGPPPARRRECRGVHRGGRRVLRQEGDSQGLQNHDCAGQGHLQERA
LRSPG,;
CCDS30833.1, Del, C_7,
(SEQIDNO: 4120)
FWGLLLLHLSTSSLHHFLPRHLDGPLLQNLPFRVLGSLQTIKHPSPWPPQ
PCWEM,;
CCDS45921.1, Del, C_7,
(SEQIDNO: 4121)
GQRPSPRPPLAPACVPRAGQRWPRDPWPRRPYARGLLSHRQQAADPSGGN
QPNLN,;
CCDS10055.2, Ins, C_7,
(SEQIDNO: 4122)
HAGGHQLRFCTEGFLGALEPAGGGAPGGGLGLCPVEAGAGADRPSPPRPA
QRRTG,;
CCDS1912.1, Ins, C_7,
(SEQIDNO: 4123)
HQRAPFPVAADEVSHWGRHDKKGPWRCLQPAVRLLCHREGRAGHEGSSWG
GGAHL,;
CCDS3863.1, Ins, C_7,
(SEQIDNO: 4125)
PLRSLHLPRLGQRAGLGHRHILHGHGAHLCGLQVLQPAWVLSRETGLRHC
TREGP,;
CCDS6412.1, Del, C_7,
(SEQIDNO: 4126)
PWEVAPRCGRPKLNGATRSGCACRVRSHRHPSVPCPLPSSGPWRPRSVRC
GGQPG,;
CCDS53984.1, Ins, C_7,
(SEQIDNO: 4127)
QSLPSLLSRHQDAEWQHSPNGRLCPALPAGHRLQHGVGPGGCIPAPRPVA
GAGEE,;
CCDS8162.1, Ins, C_7,
(SEQIDNO: 4128)
RAAAGGGLHVTGAQRGAVRAGPAAGDQGPAGPAARFRAGTPAPATGPPRR
GPSHL,;
CCDS7916.1, Del, C_7,
(SEQIDNO: 4129)
RAAPPPPQIEAPPPTALAAAAQPPRWHLRVVPLLPRLGVGATRIETESTT
RPMCD,;
CCDS2283.1, Del, C_7,
(SEQIDNO: 4130)
TCRRPALPSLYTPTPTSRLGCPVRLTVPWTAPMSSTLSLRRTPTAQRWSP
SLKAL,;
CCDS34961.1, Del, C_7,
(SEQIDNO: 4131)
TPMDSHRSSQDKTLTHPSMETTRRRVPHPTMTTRTSLPPTGMTRASDRPS
SARCS,;
CCDS9592.1, Del, C_7,
(SEQIDNO: 4133)
ELRALGLVREPPAAKRRRRSRDWSRVTRGTAPLRTRSWKLSKLESGRWRK
KLRS,;
CCDS32928.1, Del, C_7,
(SEQIDNO: 4134)
KSTTPRARQPWWPGIPCRATTRCGVLATRATWQPQALRGQGPMGTGRCSW
SPVS,;
CCDS14306.1, Ins, C_7,
(SEQIDNO: 4135)
NLTCAGNYTPDISQYTDWESQDLGARQRISGGLRISGPRRGEPTRRGSWR
SGHG,;
CCDS12394.1, Ins, C_7,
(SEQIDNO: 4139)
PVSIKSERLSPAPGGPGDFPKTFPYPLLLARSLAEPLRPGPALRRLPLAD
GWPR,;
CCDS7845.1, Del, C_7,
(SEQIDNO: 4141)
SCTWCGRWRRQPSRRGPTVPPSSSTAVQGLGGPAASLPPASAASSCGRRV
WWTS,;
CCDS32760.1, Del, C_7,
(SEQIDNO: 4142)
TAASIAPLTRPSPRNSARPAAVATSLQSRGCREPRWGSPGASSHPATPAT
SWRT,;
CCDS5928.1, Del, C_7,
(SEQIDNO: 4144)
TQGRGSARLPSRARPGLHWFIHRHTMLPPKPRRWRRPWDPRKPACWRSWS
SRTKQ,;
CCDS2529.1, Del, C_7,
(SEQIDNO: 4145)
WETLSTWRPSERWSCRSPASLPRMWCWCHQASMPWRATPPLLGATTSPPD
ASGT,;
CCDS54507.1, Del, C_7,
(SEQIDNO: 4146)
ARPLPPPQILERKRKGRPLGLLVAPRPAPRSWPRKLRRPGLGVLGTQAKE
LWH,;
CCDS11120.1, Del, C_7,
(SEQIDNO: 4147)
ILGRGACESGPCCCWGFWGWCLGSAWSLSTGTRRIRGSRQRVVMCCTLRS
GTG,;
CCDS32423.1, Del, C_7,
(SEQIDNO: 4148)
KARCPRVGCLHSQLPHPHPTPTSDTPKVSSLARRLDFQEEPMTGFLPFHP
PGN,;
CCDS4716.1, Ins, C_7,
(SEQIDNO: 4149)
PHSSTCENRAPEASKGGRAQDSRGPGPGTEPALCGSGPSSPQQAPPAVHS
GPC,;
CCDS835.1, Ins, C_7,
(SEQIDNO: 4150)
PSAPGGPGVESSPKCARLHGTAVGGCAVPVRWGASPRGLQPEWALLGRLP
LAF,;
CCDS46024.1, Del, C_7,
(SEQIDNO: 4151)
SASSLSASLRPPGAPATFLRPSPIPCSSPGPWQSLCGLGPPCAGCPWPTA
GPG,;
CCDS59451.1, Ins, C_7,
(SEQIDNO: 4155)
HLSGATSHSSSTTACGRQALPVCGSGEGLQPCSQRDHRSEHSCAGSAWAS
MF,;
CCDS34406.1, Del, C_7,
(SEQIDNO: 4156)
IAPLVKTEPQRPVKEEEPKIPGDLDQEPSLLYADLDHLALSRPRRLSTAD
PA,;
CCDS4805.1, Del, C_7,
(SEQIDNO: 4157)
LSYSFFTNVVPARWTCCVPSCSSLSSQTSVSCGSAPGCWPFHLISASAML
LC,;
CCDS33068.1, Ins, C_7,
(SEQIDNO: 4158)
PLPLPPPYHWPGVRELPPVPSRLALAACHAPAPPPLPTLLLQPARPTLPV
QL,;
CCDS56095.1, Ins, C_7,
(SEQIDNO: 4159)
PQFHPLCHSPTPGHHQQHKPQPSRQPLGYRLVRPEPQHGPWPLVEPCPLP
AL,;
CCDS47954.1, Ins, C_7,
(SEQIDNO: 4160)
PSPHTVGRHQGLARCHWTEPSFSADVSSGNTAGPGSWEFCSPWLPHQRSP
CP,;
CCDS58032.1, Ins, C_7,
(SEQIDNO: 4161)
PSRPLPPDPVSKRLQSQGPAKPPPPRKPLPADPQGRCPSGDLPGPGAGIP
PL,;
CCDS8986.2, Del, C_7,
(SEQIDNO: 4163)
FHHIATDVGPFVRIGFLKIKGKIKGKSLRKPNWKTQHKLKRALMFLIVKK
L,;
CCDS46055.1, Del, C_7,
(SEQIDNO: 4165)
NPQRWRSHLSCDLPLPPPHLFPRSQHQSPLFIHVPQLLHLPQFHSLRRDG
PS,;
CCDS45010.1, Ins, C_7,
(SEQIDNO: 4166)
PRRRPRAPHRASPAPPPPRVQLAGGGGHRRLRHRQLQHPGGPGEGYGPEA
T,;
CCDS32744.1, Ins, C_7,
(SEQIDNO: 4168)
TLCQLLPRDPTLSLPCLPRWGANPSEGVWPSPSPRAPARQAHRLQGEALC
L,;
CCDS56415.1, Del, C_7,
(SEQIDNO: 4169)
VLGGLGPLFMTGMPTAMSWLEPSIFLVTALLWMFTSTWNRPRFRVSPGYG
W,;
CCDS11367.1, Del, C_7,
(SEQIDNO: 4170)
WAARSWCESRAAAVAPLAPWAWGCPAGCTPPVAARACAATRPEGWRSPCT
H,;
CCDS3883.1, Del, C_7,
(SEQIDNO: 4171)
AAPCRRGAPSGAPSPPPPPADPAPSPSRGTATPSSGRHPATRPLARILT
A,;
CCDS41800.1, Del, C_7,
(SEQIDNO: 4172)
CPHLFLLAFGRRQKSRRAPAPSVWGRSRMPRHWRSAGIHSARAASPGLC
R,;
CCDS27.1, Del, C_7,
(SEQIDNO: 4173)
CRSSRTWASPCSLSAPAEATSWSCQPLPQPLPRSTCTLWTWMTCTSLSK
S,;
CCDS59221.1, Del, C_7,
(SEQIDNO: 4174)
DPPAPRVPGAGAWSPTAPSRGARAPPSPTSSWWPWRTSSGPRATCQCAS
A,;
CCDS3444.1, Del, C_7,
(SEQIDNO: 4175)
KHCCKRITLRSSCSLGRDLYLWNPRILKGSGGYTDVIMMDATKCTLKAP
T,;
CCDS3565.1, Del, C_7,
(SEQIDNO: 4176)
KTRRKVKILQINPKERKREAKMEKIEETERRKIHVMQNFKISAFTENAN
I,;
CCDS11834.1, Del, C_7,
(SEQIDNO: 4177)
LHRRAAHSRVPSPRSWGPRLGPAGRIGGNFRGPHPRAHRVQLLGADSWK
Q,;
CCDS1085.1, Del, C_7,
(SEQIDNO: 4178)
PGRCRLTLCPRDSSLRGQPSPHPQGSHCLPTPRAGAHRVTCPAQGLESR
P,;
CCDS46446.1, Ins, C_7,
(SEQIDNO: 4179)
PHICISRCCLPVHGYSQQRPVHCHQRREWLWEDRKRPPDCSAFDFLGKG
Q,;
CCDS12642.2, Ins, C_7,
(SEQIDNO: 4180)
PRPGPAGGALLPRSLTAFVPHSGHGLPVSSGEPAYTPIPHDVPHGTPPF
C,;
CCDS55403.1, Del, C_7,
(SEQIDNO: 4181)
SNRIRLHRLILPMKIPRQLPQMSKVKVMPFIHSLKMRNLHFHILTWPSW
MT,;
CCDS7353.2, Ins, C_7,
(SEQIDNO: 4182)
SQAEQLQDCGRCQQEDPGATRCLHQKVPAGAWGALVWWEPAWGVCGRGG
G,;
CCDS3483.1, Del, C_7,
(SEQIDNO: 4183)
ARTGTHTPRPPRARARRAAAGSSAAGAAFPPPPPARRARPRCPSRAAG
G,;
CCDS46133.1, Ins, C_7,
(SEQIDNO: 4184)
GGRGLRGLPPRPRVGRPAAPQQPAVPGAPRGQVPRLPPAPPGPPAPHR
E,;
CCDS8132.1, Del, C_7,
(SEQIDNO: 4186)
GKTSTPLTSISPRWPSLLTCSWLGWHWAFRKGSPRRCWACVQAQRWCG
W,;
CCDS10641.1, Del, C7,
(SEQIDNO: 4188)
KARCPRVGCLHSQLPHPHPTPTSDTPKVSSLARRLDFQEEPMTGFVSS
H,;
CCDS31340.1, Ins, C_7,
(SEQIDNO: 4190)
PGPLRARGHPLLLGLYAGAGGNPAGLLHRRGHTPGEEVHTVCGGQLEQ
V,;
CCDS7725.1, Ins, C_7,
(SEQIDNO: 4191)
PVLHSRLRHGLLQPVGPLHPLQTAGHRLLDPPQVQQRQVQHLREEWYL
V,;
CCDS9989.2, Ins, C_7,
(SEQIDNO: 4192)
RGGRHGGGHRGPGGPWLGLSMGPQPSAGEPTHTAHEEAELAEAAIQRG
T,;
CCDS30673.1, Del, C_7,
(SEQIDNO: 4193)
RKSPLPLKQRAEDPPHQPWAHGMPDLLEGAASHLQQQCQPPTALPPSK
R,;
CCDS10746.1, Ins, C_7,
(SEQIDNO: 4194)
RLSFPRSGTQSSSGPPPHPPAPGQTGSVGPGHVLLRVLSPAAPGSTGQ
P,;
CCDS55757.1, Del, C_7,
(SEQIDNO: 4195)
RPPLGPRAASQSGRSGVQWTGASQRHMGSTSGSRPTCPGTSATLGSST
V,;
CCDS45890.1, Del, C_7,
(SEQIDNO: 4196)
SCPRAPRRARDRPRWAPPRRNRTWPLRPPARPHGAPGCLPSWQPRARA
C,;
CCDS9327.1, Del, C_7,
(SEQIDNO: 4197)
SPTTPRWRTFTTTSRLSSRSPTRPPGPSRREPSRASWRSPTASSCLSH
G,;
CCDS12326.1, Del, C_7,
(SEQIDNO: 4198)
VPTAWGLCSVLQGPSSLASKRHSRGPRRAGGPPGRRGWGRRGPGGGAR
S,;
CCDS7529.1, Ins, C_7,
(SEQIDNO: 4199)
KKDACPSHSRGGLPMECQAPSGHHHQTCLVLGPSCPSAPMHSCLPGAA,;
CCDS12172.1, Del, C_7,
(SEQIDNO: 4200)
LAPRQTAAATAHHRTPRRALKSLPQKRARTPPFTRSLMRISRRNPHPP,;
CCDS59482.1, Del, C_7,
(SEQIDNO: 4201)
LGAGEAASLTPWCPFTLKSPAMSSPEHTWSFPTATRTGLCPTTVTTFT,;
CCDS34863.1, Ins, C_7,
(SEQIDNO: 4203)
PAASDSGGVPAGCLDFIHAYFGGVGGPVPAESCRGSSPNPGGTRGNGA
Y,;
CCDS54954.1, Del, C_7,
(SEQIDNO: 4204)
PPASLCRLAACCVTGNAKAGKKALLKMDWCCRVRSCPLTSCQSSSRIS,;
CCDS58757.1, Ins, C_7,
(SEQIDNO: 4205)
PVQFSRKGLRVPEQPAVPRSPGTPCGNRQREGRGEGLPPRGRPGHLSR,;
CCDS3883.1, Ins, C_7,
(SEQIDNO: 4207)
QQPPAEGGLLLELHPRLPRQPTRLLHLPGGQRLPPAADTPPRGPWQGY,;
CCDS58553.1, Ins, C_7,
(SEQIDNO: 4208)
QTNRHQVPCPWCPWTVAPTALSPGRATEFPEILWHLPAPPWPWVPRGT,;
CCDS12136.1, Del, C_7,
(SEQIDNO: 4209)
RPPHSQQPFHSHCPSRSPQPSLRPHPHPLRAQGCNPSLSTTHRWYSWG,;
CCDS13465.1, Ins, C_7,
(SEQIDNO: 4210)
SPTDHPGLHRLEICSARPEQVPRARRCDQKLQRCFCTRAVLAQAGRAL,;
CCDS53377.1, Del, C_7,
(SEQIDNO: 4211)
SRPRRRRPRRPRPPRRRPPQRRRPSPPPPPKGRATPSSALSTKRPSCA,;
CCDS1911.1, Ins, C_7,
(SEQIDNO: 4212)
TAAPSASCLLFLGPAPGSACRLRTGFLGLRAIQLARTESGQRQQLQES,;
CCDS45010.1, Del, C_7,
(SEQIDNO: 4213)
EAPPPRPAPRVPRAAAAASPARRRRRSSTASPSPASAPWRPWRRIWP,;
CCDS31328.1, Del, C_7,
(SEQIDNO: 4214)
GMPYHQSAPHILTGATSQHQPWPSTSRSCMTSQPEMPTSYRCSRMRS,;
CCDS46133.1, Del, C_7,
(SEQIDNO: 4220)
RKRPAGTPPTPTSRPASRPPAACGPWCPQRPGPPAPSCPTGTSCAAS,;
CCDS11693.2, Del, C_7,
(SEQIDNO: 4221)
RPKEVAETLSFRIPGTQSLQAVTVVGAAAAAAAASIARTGPAGRKAA,;
CCDS45999.1, Del, C_7,
(SEQIDNO: 4222)
RPPRIALSSPTPAAPRPIQLRLPGNPTTPQWTSPQPAHPPSTTPSYK,;
CCDS35440.1, Ins, C_7,
(SEQIDNO: 4224)
APVPQPEQQRHRQRHLPDHACHQVSYLFSVFLQSREPAPQRGDVPL,;
CCDS31863.1, Del, C_7,
(SEQIDNO: 4225)
EGAAATPLGSPPRGLWAPRRPPLPTSSTTTSRAARRPHLPSPVPGA,;
CCDS4512.1, Del, C_7,
(SEQIDNO: 4227)
IISQFTLALPMWLYQESLPTLFCMTHGLLICSSGPRTLSVLMSISG,;
CCDS12328.1, Del, C_7,
(SEQIDNO: 4228)
IRPQASSHPRRSLPSLSKSSSTTIHPGTTSRTPTQPVTSAKPPPRL,;
CCDS45176.2, Ins, C_7,
(SEQIDNO: 4229)
PHLQPPASTGPGRYPGRTHGLPLPGHPPDLEGDGDGPGGPGGPTPL,;
CCDS12575.1, Ins, C_7,
(SEQIDNO: 4230)
PSASARQPPSSHPLSHPRGMHQQPGPLILDPLASCGDAGGSAPGPP,;
CCDS30649.1, Ins, C_7,
(SEQIDNO: 4232)
QRWGPSAVPGLQLRGHRPDGRRRQASCPAGTPALGGTATPWEEPGF,;
CCDS58576.1, Del, C_7,
(SEQIDNO: 4233)
RAKVLGPRPALVSASGGGLRPATPRIPWPLAPLTAWLPRPPQRKMC,;
CCDS34004.1, Ins, C_7,
(SEQIDNO: 4234)
RGGGGRRRRWRQQQSSLGLVSSWDGASLRPAPEEEAAAAAAPQGQA,;
CCDS42929.1, Ins, C_7,
(SEQIDNO: 4235)
RKCPSHSNITRKHINILVHTFQGSLEWNSPGVQSHLLGQPHGRRAG,;
CCDS8023.2, Ins, C_7,
(SEQIDNO: 4236)
RTATHVHPFLGEPRHPDGDRGGAQVIPWTPWPEQWTPSPSGGQRRA,;
CCDS14053.1, Ins, C_7,
(SEQIDNO: 4237)
RVQRGALHRWGSEQQLALCRLPLHHHGVALPWDSGHLPPEHLPQPA,;
CCDS46332.1, Del, C_7,
(SEQIDNO: 4238)
SPSRSSITASLAAGLWWASVPSAPWRASCVTPTRRRVHPHRVAQTM,;
CCDS45225.1, Del, C_7,
(SEQIDNO: 4239)
TMVQGPAGHPLAMAQGPAGHPPTMVQGPAGLPLAMAQVTHPLVHIT,;
CCDS12922.1, Del, C_7,
(SEQIDNO: 4240)
TPAGPLSRTGTGPGAMGCLTWCVWTFVAWPQPHQLPQPLLGPQAPS,;
CCDS8859.1, Ins, C_7,
(SEQIDNO: 4242)
EGRDHPVPAQAVQLSGHLCRWSGQVQHRQRQCELSPHHPVHVPQP,;
CCDS8213.1, Del, C_7,
(SEQIDNO: 4243)
GDCPRTMAGPSASLHPASGRASRKTWQRRLRACRAGGPAGWARQA,;
CCDS12328.1, Ins, C_7,
(SEQIDNO: 4245)
PATTPTRSSSPARTEPPTHHRGHPTACEDKEGSEEESRHHHPHHH,;
CCDS45010.1, Ins, C_7,
(SEQIDNO: 4246)
PGDGGRAPHAPRAAAEPDYSAGGPRAGRGARLLPVPKSPGGGGAV,;
CCDS55589.1, Ins, C_7,
(SEQIDNO: 4247)
PPGRAAHSGPGGAPLPTTPRETETEQGWLGPWRHPEYPVLPDGAG,;
CCDS46055.1, Ins, C_7,
(SEQIDNO: 4248)
QTPKGGGLTCPATSHYHLPTCSPGASTSPLSTTCPNSSIYPSSTP,;
CCDS42523.1, Ins, C_7,
(SEQIDNO: 4249)
RARPGPRARLPSGIPARLPRALQEAFGESEHPPAAALHGGPSAVL,;
CCDS12160.1, Del, C_7,
(SEQIDNO: 4250)
RSHPRPTARCQAGGAPSPAASLRRSSRRAPTTRPTRMSWWSYTGG,;
CCDS46835.1, Ins, C_7,
(SEQIDNO: 4251)
SPPCPDPAQVSSPPYPSLPHKPPVRSGRQQLYAVRQCQQRRVLLE,;
CCDS5565.1, Del, C_7,
(SEQIDNO: 4252)
WAAASEMALPSVDPTWISENPQKRKEHRDHDSSLNLEQSRRPSIK,;
CCDS5336.2, Del, C_7,
(SEQIDNO: 4253)
GAAAASCQSPPSPRETTPSSDATRRTRPIAAQSKKTMTAAGLTP,;
CCDS12716.1, Del, C_7,
(SEQIDNO: 4254)
GPSHRWQPKWGSIARCGTPGSPATGPSSTASASFPSPRSSCSAS,;
CCDS3253.1, Ins, C_7,
(SEQIDNO: 4255)
HADDAPAARGHGAPRSPSGPRPGLSAPGTDRQQTVLPHGHGKPQ,;
CCDS8860.1, Del, C_7,
(SEQIDNO: 4256)
HQDGVAVARPVTARPAPRGAVGTCLGFVQLCHPMNLEDQEAQGA,;
CCDS42665.1, Del, C_7,
(SEQIDNO: 4257)
KRVALLTMWTCMDMLPKGAASCTETALVMRAPRWKTCYIQSSSP,;
CCDS46186.1, Ins, C_7,
(SEQIDNO: 4258)
PDHRRGEEPRALGASPKPECPGPHASSDTQWLCPGRACIPRLPI,;
CCDS7626.1, Ins, C_7,
(SEQIDNO: 4259)
PGGELGSRPGAHGTHPGPRSAGNPILPRGRLDKRSCIRVAPTIF,;
CCDS10639.1, Ins, C_7,
(SEQIDNO: 4260)
PRRGAPEWGACTLSFHTLTLPLHRTPPSSISSLPAAPLPPPGEL,;
CCDS45451.1, Ins, C_7,
(SEQIDNO: 4261)
PRRGAPEWGACTLSFHTLTLPLHRTPPSSPSTPRGTEDCPGRDL,;
CCDS42824.1, Ins, C_7,
(SEQIDNO: 4262)
QESGHGHRPGLPDVHSAAPGAGLGPVDGTGHRPAGARVGSHRAA,;
CCDS47339.1, Del, C_7,
(SEQIDNO: 4263)
RDRWPPSRPHQPAGITRHCPHPRPTTKNPAEAETTKRQSSLLLQ,;
CCDS4774.1, Ins, C_7,
(SEQIDNO: 4264)
RGSRTEQLPKPGPRRGWGPRWPGRGRGAGGRGGGRRRGPCVRLG,;
CCDS7477.1, Ins, C_7,
(SEQIDNO: 4265)
RVPSPGGSLLGSVAPSLPFLPGWRQETLACRQSCRFEGKDPDST,;
CCDS8944.1, Ins, C_7,
(SEQIDNO: 4266)
YPHSFKFCAAGCHPGSPLGDTPPALCPECPPTWTTYLQCHHGNY,;
CCDS32391.1, Del, C_7,
(SEQIDNO: 4267)
AMRRPSSRHAAHRPLCQRFPTLTVSRWMTSLISSLRVERSPSP,;
CCDS45960.1, Ins, C_7,
(SEQIDNO: 4269)
AQWLRRTEQRWEWRGPPVSLLFRLAHFLLHQRPAGWPQAEPPQ,;
CCDS12601.1, Del, C_7,
(SEQIDNO: 4270)
AWSTLWPPAQPHLQPPFCPRARQPLPLPPQPRLALSPAPQQVP,;
CCDS45660.1, Del, C_7,
(SEQIDNO: 4271)
CCLRTMRSTRGSTGPWGAGAAGAAGAGASPTWGWCTRPSGGTR,;
CCDS44482.1, Del, C_7,
(SEQIDNO: 4272)
HLSQVKGPVNWKDAQVPRLRFSLPVALDAGKNTLTVKNKPNQL,;
CCDS10639.1, Del, C_7,
(SEQIDNO: 4273)
KARCPRVGCLHSQLPHPHPTPTSDTPKFNLIPPSSSPSTPRGT,;
CCDS10457.1, Ins, C_7,
(SEQIDNO: 4274)
KGTQVPGAAVTDALQPNQRPGDGGRHAATAGAGPDGGQHPADR,;
CCDS45937.1, Del, C_7,
(SEQIDNO: 4275)
NLRLHPHPGTLAVHTCMGTRLATCMTTTLNISRHSRYWTQESS,;
CCDS5715.1, Ins, C_7,
(SEQIDNO: 4277)
PGVSGRVCGTAYSVSAPLPAAAATPGLSPRQGHPFPAQQRGLP,;
CCDS42522.1, Ins, C_7,
(SEQIDNO: 4278)
PISSHLHQRPDAGLGHVPVLLEVPEPSSSDTPRLCGPGHPSRL,;
CCDS4856.1, Ins, C_7,
(SEQIDNO: 4279)
PLPPYPAQRTAYCAHISERQLFPRGDPRLPPPVRTRRVQVARL,;
CCDS8384.1, Del, C_7,
(SEQIDNO: 4280)
PPAPPLLSHPPPPALPLRPPAPSLHEPGAHTPKWGAPGTRFSR,;
CCDS941., Ins, C_7,
(SEQIDNO: 4282)
PWIHWPSTTPTLWLPAGASPSTQTHSPATSSPSRPTSRPSPSV,;
CCDS42153.1, Ins, C_7,
(SEQIDNO: 4283)
QASGGQHSPWRVALAGQCEEARSPHLQRLPGGRHLGPHCCPLL,;
CCDS42516.1, Del, C_7,
(SEQIDNO: 4284)
RHHLSSSWATSTPSNAGSVRWNSRAPSPSRKSGCGTYSGTSWR,;
CCDS10978.1, Ins, C_7,
(SEQIDNO: 4285)
RLWEDAAGQGGGHGGSGALPGDGRPRVRGGHWRPRRCPCAEPL,;
CCDS10055.2, Del, C_7,
(SEQIDNO: 4287)
RRWPSAQILHGRVLGSPGAGRWGSPRRRAGTMPSGSRSGSRST,;
CCDS54035.1, Del, C_7,
(SEQIDNO: 4288)
SSSSSSSNHRCSSLPRRQQPSRHPHHSSHCNSSSNARTKTVRK,;
CCDS47263.2, Del, C_7,
(SEQIDNO: 4289)
TVSPNSLSTNISTAHIPPLHLRTSARSKFTGLCRPLTSLASTP,;
CCDS5091.2, Del, C_7,
(SEQIDNO: 4290)
VGKKLWQLCWIMTCLRLFTRNHFAVILLMYQKSPGRLVDGSSW,;
CCDS8946.1, Del, C_7,
(SEQIDNO: 4292)
AKVKAVMVASLSPTIGLWSSKKYPVRTLLTCIATSPTITSTL,;
CCDS48066.1, Del, C_7,
(SEQIDNO: 4293)
ALRHHWPASSSCRMQTGAACWHTSTASTTRAGSEKQPRWARR,;
CCDS31272.1, Del, C_7,
(SEQIDNO: 4294)
AQVLSPQSRPPHLHLGWAQGRALGWLWGEQPSTPRQTWTRCP,;
CCDS44512.1, Ins, C_7,
(SEQIDNO: 4295)
CPRGPPTLLRRQRAARGRVLRLGLCGRASRSWLRRQLCQVCL,;
CCDS45590.1, Del, C_7,
(SEQIDNO: 4296)
CVTCTPCEPSSSFLGTLRPGSSPRSGLRSSLTSLTHVSSRLT,;
CCDS10679.1, Del, C_7,
(SEQIDNO: 4297)
DQWCPDGSHLGQPRQLPRDRRPRTSHISALIAARGLCSAAAS,;
CCDS53661.1, Del, C_7,
(SEQIDNO: 4298)
GCPRSPGPKEASSRALRLHPGLGRGCWLPGRRRPRPWARWGP,;
CCDS31173.1, Del, C_7,
(SEQIDNO: 4299)
GRRCWTMHPACRWSWTMHPCRRRKPPNPRPSAGTGTAVTPTA,;
CCDS8083.1, Del, C_7,
(SEQIDNO: 4300)
GSLLGLSLAQPEALKVAARLRCQHPQHHHRRRVQCSLSRVRR,;
CCDS27.1, Ins, C_7,
(SEQIDNO: 4301)
HAGAQGPGRHRVHCQHRPRQLPGAVSRCLSPCREAPALCGRG,;
CCDS594.1, Del, C_7,
(SEQIDNO: 4302)
LSTVTTHWSSGWTLCWALPKRASNWTSRTSRQWAPPWTSCGS,;
CCDS941.1, Del, C_7,
(SEQIDNO: 4303)
MDTLALHDPHPMATSGGLSLHPDPLPGHQFPLEAHFEALSLS,;
CCDS59192.1, Del, C_7,
(SEQIDNO: 4304)
NNIQFNHRGQVLFILDQDLGTSPMLMERLFTQVSRCISQHLS,;
CCDS41281.1, Ins, C_7,
(SEQIDNO: 4305)
PGHGGSQAGAPAGGGAEGGAAAQPAHGLLCAEADLPQQRRRA,;
CCDS59002.1, Ins, C_7,
(SEQIDNO: 4306)
PLQQPGKLTRTRSPPPLCARAGAAAFLAPLPPTPYRPPSVGC,;
CCDS14023.1, Del, C_7,
(SEQIDNO: 4307)
PLTQGPRLASLPTPLTLSQEALYWMMQRSKMSQTLLLWRWAW,;
CCDS7725.1, Del, C_7,
(SEQIDNO: 4310)
SASQSSSTRAPPTCGSPPSTANCWTSLAGSTTSTTATSPAPT,;
CCDS34063.1, Del, C_7,
(SEQIDNO: 4311)
SSSAPARPYSPSECWTPMTMCPLSTNPSTLCPYQRTLPQALS,;
CCDS42268.1, Ins, C_7,
(SEQIDNO: 4312)
SSSPRRLGFPPVSTPKSQVTGQEVHGALRDARPAEFQERLAD,;
CCDS6067.1, Del, C_7,
(SEQIDNO: 4313)
TPRPAPSIWGMLLVLPKLIMALRPILTLSCWTNQLHEKERTL,;
CCDS45171.1, Del, C_7,
(SEQIDNO: 4314)
WPALMACRRPGAVVESARQPWSPPPRARWGAPQAPQLQPPSS,;
CCDS30833.1, Ins, C_7,
(SEQIDNO: 4315)
CFGVCCCFTCPPQVSITSCPVTWMDLFSKTSPSESWDPSKP,;
CCDS54035.1, Ins, C_7,
(SEQIDNO: 4316)
PAAAAAAATTGAAASPAASSPAATHTTAPTATAAATQGQRQ,;
CCDS2.2, Ins, C_7,
(SEQIDNO: 4318)
PGAPGLRTPHPVPGLCPASPPEGGSRPCLSAAQRVQGDDGG,;
CCDS5404.1, Ins, C_7,
(SEQIDNO: 4319)
PGYLRAAPRLLPCVPAQLRTPATPTEALHGGRGGRRGHPRL,;
CCDS32552.1, Ins, C_7,
(SEQIDNO: 4320)
PPCPTTPPPSRGLLGASGLPLFCGHSGFSHPSHSPNPNHQQ,;
CCDS59406.1, Ins, C_7,
(SEQIDNO: 4322)
PSPLTPAPTYPIAPSLAGSGPGHRPVAAGRVLSLRGTARCS,;
CCDS54626.1, Del, C_7,
(SEQIDNO: 4323)
QAHPQVPALAPQAWWPARRGPLTSAPSAQQSLTKSSSSTTT,;
CCDS5812.1, Del, C_7,
(SEQIDNO: 4325)
RAVETLRLQLPPRSGPRSPARARGPPPLSAPPPGRCLRRRP,;
CCDS55757.1, Del, C_7,
(SEQIDNO: 4326)
RSLMRWRKTPAPPAGRPVCTKQRPWASAPSATTSWRPGPRS,;
CCDS6981.1, Ins, C_7,
(SEQIDNO: 4327)
RVFCEVLPERQIHPGRHAGQHSEALGLQQGEVPEDVHWPQE,;
CCDS12190.1, Ins, C_7,
(SEQIDNO: 4328)
SHREGRAQRTEIALASSWDLSPEPVPGAPGASGSGSHPCQV,;
CCDS11765.1, Del, C_7,
(SEQIDNO: 4329)
ALGGACTGTWGPRGEGPPSSPGSLWPESWGTRRKSPGAPP,;
CCDS9239.1, Del, C_7,
(SEQIDNO: 4330)
WASPLSKDSLRSSCPHIRHLSLRDPRPGSLHTSRVSSSS,;
CCDS11136.1, Del, C_7,
(SEQIDNO: 4331)
HPCQPLWTWSSNGCWARCLGRSSSCRGSPPCCSLWPCPQG,;
CCDS46143.1, Ins, C_7,
(SEQIDNO: 4332)
LPPWPPRPTTTSSPPPNSVQPAGFLFRCRRRCRAVLPTAL,;
CCDS46134.1, Ins, C_7,
(SEQIDNO: 4333)
NSAWHLCHPKPARRSPACQQPGPYCPRPAAAASPPPVPAA,;
CCDS13305.1, Ins, C_7,
(SEQIDNO: 4334)
PCPPETENHRHCQQVPEQAAGARVLYFTFPGGWTQELQFL,;
CCDS13254.1, Ins, C_7,
(SEQIDNO: 4335)
PGPERLQARGSQLWWGGHQCQCQGKGRHRADRRPDTAQEG,;
CCDS41977.1, Del, C_7,
(SEQIDNO: 4336)
PLPTLTCPTMPGRTPTANPPTPSAASYLWPSRTLQPSACQ,;
CCDS56094.1, Ins, C_7,
(SEQIDNO: 4337)
PQFHPLCHSPTPGHHQQHKPQPSRQPLGYRLVRPEPQHGV,;
CCDS12597.1, Del, C_7,
(SEQIDNO: 4338)
PSGSGGVGAGPVVVPDGGGEGPQPHPSSSQSPPDLPLKAK,;
CCDS32409.1, Ins, C_7,
(SEQIDNO: 4339)
PTSWCPLSWGQQPHQHSTNSFQDSNRLQFQGFRTASQHLS,;
CCDS54003.1, Ins, C_7,
(SEQIDNO: 4340)
PVCVPRVQGDLLHNDAAASARALTPGAPALPLHPVRQELL,;
CCDS5873.2, Ins, C_7,
(SEQIDNO: 4341)
QAALQRGGQVDGSCRGLPLPAWIPTSTRRQGLPSLPTGAL,;
CCDS4269.1, Del, C_7,
(SEQIDNO: 4343)
SQVPAWSRSTSWTPMTIALRLLRVHWHWKSKKMLHLVRFS,;
CCDS33602.1, Del, C_7,
(SEQIDNO: 4344)
SRPRSPASPAHSPTPTSALALPHLPVASCPAPHRSPPRAQ,;
CCDS8932.1, Del, C_7,
(SEQIDNO: 4345)
TSSPVPVAAASPSPGRVIWMTTVGTALMSLLRVPIPPASP,;
CCDS8992.2, Del, C_7,
(SEQIDNO: 4346)
GPHPPGRNPASQKEAPRCTSAWESCPPSGRPARQALYRA,;
CCDS59410.1, Ins, C_7,
(SEQIDNO: 4347)
HLLSAPSLSPTHTAVRQVPACVCARLGLQGEEDRGAVIR,;
CCDS299.1, Ins, C_7,
(SEQIDNO: 4348)
LPRAREPTGCHVSGGYVQGPSANAQLSVGRGPSLSPPNF,;
CCDS54212.1, Ins, C_7,
(SEQIDNO: 4349)
LSPSCDFTSHLWPGDNHRYLGYKHRTWNQFIFKFEHHLP,;
CCDS13305.1, Del, C_7,
(SEQIDNO: 4350)
MSAGNRKSPTLSTSTGTSSWSQSFILHFSRRLDSRTAVL,;
CCDS13789.1, Ins, C_7,
(SEQIDNO: 4351)
PQPAAVHGLCHPSSVSGARGWAQGGPRPPGAPPSQRLRR,;
CCDS12603.1, Ins, C_7,
(SEQIDNO: 4352)
PRPGQVRAGQPQFQGGLGVPDKILFPLGLRPTGLPFPLP,;
CCDS33116.3, Ins, C_7,
(SEQIDNO: 4353)
PVPGARQGLRVRRLPAAAPPAPQPARASRPAAPAPARGA,;
CCDS30977.1, Ins, C_7,
(SEQIDNO: 4354)
QKAQDFLRISVGSSSRCHAYHPGDCSHHLPGPVLLSPCW,;
CCDS6954.1, Ins, C_7,
(SEQIDNO: 4355)
RDAPVRGGEPHLRVDAEHAGATPDPPARRSHPLHDPALA,;
CCDS33927.1, Ins, C_7,
(SEQIDNO: 4356)
RPPERGTEHLPAPPASRRGEKGASTSPTSACLLHSETNL,;
CCDS8844.1, Ins, C_7,
(SEQIDNO: 4357)
RQPRWVSPHSCAFPDALACGQPRAASELTYTCFPPGCLL,;
CCDS31651.1, Del, C_7,
(SEQIDNO: 4358)
RTGTVKVGLQGDKGLFRNLALERLLKQLVCPEIGNPFLS,;
CCDS2434.1, Ins, C_7,
(SEQIDNO: 4359)
RWSEMLPWRTSGDTEPRDSEWWPHCSARHPVTSTLPCWK,;
CCDS9256.1, Del, C_7,
(SEQIDNO: 4360)
SPPTEAASSTARPAKSRTRPTSGWHIGSTTPPRRRPSPR,;
CCDS1684.1, Del, C_7,
(SEQIDNO: 4361)
VAPPARRAPAATTTTCCTSWSSTRLSFPPFGARNASFPK,;
CCDS54132.1, Del, C_7,
(SEQIDNO: 4362)
CSWTPPQQRTPVQLSAVAALSPGCPSRWSAYWPQSWCC,;
CCDS10857.1, Del, C_7,
(SEQIDNO: 4363)
EPSPRWAPPEPTPCRAPTLPRPHSVVPAPRACKSRHGP,;
CCDS41693.1, Ins, C_7,
(SEQIDNO: 4364)
HGGLSGQGGLELGDQLPGAAGGAGPLHGVPVPGLPGSV,;
CCDS1151.1, Ins, C_7,
(SEQIDNO: 4365)
HTSGTLSCCRCRDQSPGCSSLSAPDTGWEETGSRAPAG,;
CCDS12328.1, Del, C_7,
(SEQIDNO: 4366)
KCCWRMKSHLPHPSPPCRCSCTCSSCRRCSPLRRYSLP,;
CCDS1742.1, Del, C_7,
(SEQIDNO: 4367)
KISLPKPWSGSKPLCMLWARSYRSQDPSICSSLPRMTS,;
CCDS32166.1, Ins, C_7,
(SEQIDNO: 4368)
LHPETEPAGAPPPRGQAPEDLEARVVPRTPSGDRPLHC,;
CCDS11637.1, Del, C_7,
(SEQIDNO: 4369)
PATTSTGGIFEPSIRGSVLLLPETKPTLMLELSFMFQM,;
CCDS45967.1, Ins, C_7,
(SEQIDNO: 4371)
PGYECPDAVEPAEARAAVQAGVPDWARPCPHLYHVCGG,;
CCDS3279.1, Del, C_7,
(SEQIDNO: 4372)
QTPPPKLGQEDLSNIFLTWMIKIPRKRALRRPFLCIWT,;
CCDS323.1, Ins, C_7,
(SEQIDNO: 4373)
SRCHPQKQEGEGLTQVPQHRTRLGADTRPGRRGPAGAG,;
CCDS32553.2, Del, C_7,
(SEQIDNO: 4374)
AATSSRRRRRRRHRCPRRRRPRRQIRMTFGCCRQHWV,;
CCDS8662.1, Del, C_7,
(SEQIDNO: 4375)
ALALLSSSWALPTRWPSRMPTRKMISTISPWYPGWNW,;
CCDS2407.1, Ins, C_7,
(SEQIDNO: 4376)
GSGQDTPVCSGPETSQPSGHPVAPHRSYQKTDPARGR,;
CCDS34407.1, Del, C_7,
(SEQIDNO: 4377)
IAPLVKTEPQRPVKEEEPKIPGDLDQEPVRAWGWEGD,;
CCDS31272.1, Ins, C_7,
(SEQIDNO: 4378)
ISTWGGLKAGLWGGCGASSQVLRDRPGHGAPEVLPRD,;
CCDS42518.1, Del, C_7,
(SEQIDNO: 4380)
MASTGSPHTCGDRAHPTSTTMTPAWSPMCPTSISLLG,;
CCDS12597.1, Ins, C_7,
(SEQIDNO: 4381)
NQAAAAESGPAQWWCQTAAERGPSRTPAAVRARQTFL,;
CCDS4778.1, Ins, C_7,
(SEQIDNO: 4382)
PAEPLWCLLTLGPSFSCSHLWPQASALGGSRCAGQMD,;
CCDS5336.2, Ins, C_7,
(SEQIDNO: 4384)
PEPQQHHVNHRRAPGKRLHRQTLQGGRAPSQHSRRRQ,;
CCDS33592.1, Del, C_7,
(SEQIDNO: 4385)
PGMYPLATPGTLPEAADWQQQPPHTVGEEPLHPQIQD,;
CCDS56182.1, Del, C_7,
(SEQIDNO: 4386)
PGPRHPLLIVSTQALGWPGLKPRRACQKQSTITNMGT,;
CCDS1446.1, Ins, C_7,
(SEQIDNO: 4387)
PHLCLPLWQPKECDAWQEPPDFCSPGGLPAPHCCQWP,;
CCDS2670.2, Ins, C_7,
(SEQIDNO: 4388)
PLPRHLPGPAGDLPGESWAPWKGAVSIFIHKAFPSARH,;
CCDS2283.1, Ins, C_7,
(SEQIDNO: 4389)
PPADGQRFLPCTPLLLPVAWAAQSALRYHGQLPCLPR,;
CCDS45805.1, Del, C_7,
(SEQIDNO: 4391)
PSTPLRHRTASLPSTPRPHRTPRRTTPARPRSPQSMA,;
CCDS9819.1, Ins, C_7,
(SEQIDNO: 4392)
QPRYEPRTAQGPSAGLSPAASATSGPDPLPPPLPPPL,;
CCDS7532.1, Ins, C_7,
(SEQIDNO: 4393)
RAGSGRRVLRGRVLPLCLGRRRRRGCRLFPLRLSGPV,;
CCDS2.2, Del, C_7,
(SEQIDNO: 4394)
RGPRAPDPPPRPGTLPGEPPGRGVPALPQRGPASPRR,;
CCDS8423.1, Ins, C_7,
(SEQIDNO: 4396)
RRPLSRPRQGAAAALPSLPVPAALHLRGAPAQQSQEF,;
CCDS58538.1, Del, C_7,
(SEQIDNO: 4397)
SIPTPPGFHLQWWSQIPAASVHSPTCLQVNSVLYKPG,;
CCDS6020.1, Ins, C_7,
(SEQIDNO: 4398)
TIPRGVGGQPVAWNHLSGLGPQNHWNPPDQPAPFPPP,;
CCDS42179.1, Del, C_7,
(SEQIDNO: 4400)
WWAAMASACSLRTASSIPRRWTTSGTQHPQPVPSPKK,;
CCDS3444.1, Ins, C_7,
(SEQIDNO: 4401)
ASIVARESPFGHRAAWEETFTCGIPGYSKEAEDTQM,;
CCDS45001.1, Ins, C_7,
(SEQIDNO: 4402)
HPPGAGPGPGDPGAPARRGAPGVHRVQLRRGPHIDI,;
CCDS31272.1, Del, C_7,
(SEQIDNO: 4403)
HPVLLPHPGHPLHPLGSPHPGPRALWSSSALWRRPV,;
CCDS46741.1, Ins, C_7,
(SEQIDNO: 4404)
LSRFFRIIPLFHVLFQPRPPCVHRLVGPIYGDTRVF,;
CCDS41425.1, Del, C_7,
(SEQIDNO: 4405)
PASVVTPAPESLTESCRWLAGRAVSTLSDAMEASTH,;
CCDS44115.1, Ins, C_7,
(SEQIDNO: 4406)
PGTEADAGRTLVPTHPNNAFKSGWEDHGNAAGDRQL,;
CCDS7094.1, Ins, C_7,
(SEQIDNO: 4407)
PPGPPKPGHVYPGGAAAADERAPDREPPAERSHEAK,;
CCDS47263.2, Ins, C_7,
(SEQIDNO: 4408)
PRCPPTLSLRTFQQPTSHPCTCGHQPEASSQASADP,;
CCDS33768.1, Ins, C_7,
(SEQIDNO: 4409)
PRGCARWAGVAAAAGLGACLQPLPGIAAAPWVGAPD,;
CCDS10985.1, Ins, C_7,
(SEQIDNO: 4410)
PRLPCCLQGPTGLIPGLAGRRGVGGRQPVWGAVTRP,;
CCDS12035.1, Ins, C_7,
(SEQIDNO: 4411)
PTAAAAAAAARAPPGPRARAPPAPAPGRGVAPGGGG,;
CCDS10526.1, Del, C_7,
(SEQIDNO: 4412)
QTLRPWLWLTAWAASTGACGRRQLGANARCSSGMRC,;
CCDS44659.1, Ins, C_7,
(SEQIDNO: 4413)
RPRCLPRCQLWEAVVLILPFLLLIPTWRGCVSPELV,;
CCDS7918.1, Del, C_7,
(SEQIDNO: 4414)
RSLMRWRKTGRPVCTKQRPWASAPSATTSWRPGPRS,;
CCDS55351.1, Ins, C_7,
(SEQIDNO: 4415)
RVGSCRLGSHAATSVSLTRSRNKETRTGSQERNEGT,;
CCDS56414.1, Del, C_7,
(SEQIDNO: 4416)
SHFLRSQWKFREQKELPLSLRNGSLLSSRTFRASGR,;
CCDS33022.2, Del, C_7,
(SEQIDNO: 4417)
SPSHHLPQPGGSAMPRRLTSTWAGVGGCGQPRPRSG,;
CCDS41295.1, Ins, C_7,
(SEQIDNO: 4418)
SRCHPQKQEGEGHEGRCLPPRSWRPLLPRCLRAEPS,;
CCDS47149.1, Del, C_7,
(SEQIDNO: 4419)
SRSSSLIQSFLQKTHGTCSRRGCTRCTGATIPCTWK,;
CCDS1742.1, Ins, C_7,
(SEQIDNO: 4421)
TRYHCQNPGADQSHCACCGPGATGHRTLQSAAHCQG,;
CCDS33546.1, Del, C_7,
(SEQIDNO: 4422)
WLTGLPLLYNLCLHLLILQPHCQRVLPLVDLVQGHN,;
CCDS54467.1, Del, C_7,
(SEQIDNO: 4423)
APTQQLLPPTSTTRTCGRPSTSRSSCHNGTCATFW,;
CCDS6357.1, Del, C_7,
(SEQIDNO: 4424)
ARPAARSPRLPLRGPAEAPGARRGPAASPTTCCCP,;
CCDS516.1, Del, C_7,
(SEQIDNO: 4425)
CLVPTSIQPLMSPLGPLLPLALATSVPGDQVQPLG,;
CCDS45451.1, Del, C_7,
(SEQIDNO: 4427)
KARCPRVGCLHSQLPHPHPTPTSDTPKLPFHPPGN,;
CCDS32561.1, Del, C_7,
(SEQIDNO: 4428)
LPRLGRVVPLHPLQTSPVTGDCSRPRPRWMRWWTS,;
CCDS54686.1, Del, C_7,
(SEQIDNO: 4429)
MPALQPPSVSHWQRATTVTGPWRSCCTPVSPISHT,;
CCDS11120.1, Ins, C_7,
(SEQIDNO: 4431)
PFWAGGRASRGPAAAGGFGAGVWAQPGACLLELGE,;
CCDS46736.1, Ins, C_7,
(SEQIDNO: 4432)
PSGLPSISRHPVLPRPGPLPEPDLLPAGHSLRRWL,;
CCDS34342.1, Del, C_7,
(SEQIDNO: 4434)
QPSRTSTSTFPVLRRTPAAPPLLRPSPSTSTPTRR,;
CCDS42271.1, Ins, C_7,
(SEQIDNO: 4435)
RGALFLPGGVGFGLCVPLGTTAHPVAPQPVCPRHG,;
CCDS3037.1, Del, C_7,
(SEQIDNO: 4437)
RRRTPTAMGRNHSCTSRSPSSSWMSSESWRSRTCR,;
CCDS8548.1, Del, C_7,
(SEQIDNO: 4438)
SGCLRNTGCLSDCGRQSQKALSTQTHSGSHSKRWQ,;
CCDS9586.1, Del, C_7,
(SEQIDNO: 4439)
SSHRAYTSSPWWRQLDLAHWWAGSGPRTQTWGTTP,;
CCDS31452.1, Ins, C_7,
(SEQIDNO: 4440)
TYADTHEQSANGHLGHHFNRTHFPWCVSSSSSSRK,;
CCDS8861.1, Del, C_7,
(SEQIDNO: 4441)
WNCSPLSPLSSLSATPLVLCRSWWCRKAGGCRSTQ,;
CCDS44612.1, Del, C_7,
(SEQIDNO: 4442)
AFRDRNTRILGRVSAPEASHDTVTFRTARKGEKF,;
CCDS46711.1, Del, C_7,
(SEQIDNO: 4443)
AGHRCPWAWAPWRPRRNRSPESWSRETPPARGRD,;
CCDS42714.1, Del, C_7,
(SEQIDNO: 4444)
ARMSHRRSWKAPGCRTSSQGGSQEALGKARCLTL,;
CCDS6811.1, Del, C_7,
(SEQIDNO: 4446)
GHQSPVTCWSMNQWMAQSRKSLWVQIPPPTAWQT,;
CCDS3080.1, Del, C_7,
(SEQIDNO: 4447)
GWMPRCTWAMSMSLPSGIYGKAHAQKPQQMNASL,;
CCDS2430.2, Ins, C_7,
(SEQIDNO: 4448)
HDRVLLRRHQRHNHLPPAHQCRACRGRLRCLPRA,;
CCDS33033.1, Ins, C_7,
(SEQIDNO: 4450)
LSRSPWRAQALAGAPDHSLTFNLLAPAHHCPVHY,;
CCDS771.1, Ins, C_7,
(SEQIDNO: 4451)
LSSIQGCFLWKLHLQSHHSRLFAGNQKGITTWIF,;
CCDS8860.1, Ins, C_7,
(SEQIDNO: 4452)
LTRTESPWQDPSPQGQRQGELWGPAWASYSCATP,;
CCDS9636.1, Ins, C_7,
(SEQIDNO: 4453)
PDAGRPGRRRRQGPPAAAAPAAATATTGRRPGRG,;
CCDS9274.1, Ins, C_7,
(SEQIDNO: 4454)
PGPPHQDVLSGPHWLCQLFCPPPGAWALQRGPSP,;
CCDS8521.2, Del, C_7,
(SEQIDNO: 4455)
PSPPSPSSLLSPCNASIMCPLNPAAQDGARCPSC,;
CCDS4266.1, Ins, C_7,
(SEQIDNO: 4456)
PTTPTPPHGHAGAAWTQGQGVCCLEPWRAGTVQE,;
CCDS14680.1, Ins, C_7,
(SEQIDNO: 4457)
PVSNLSAFSQWKPLDKTVSKRICQLLQRGDSSPR,;
CCDS58497.1, Ins, C_7,
(SEQIDNO: 4458)
QHRRPALGPRAQQAAPKQAGPTNRGDQELAHGRD,;
CCDS43375.1, Ins, C_7,
(SEQIDNO: 4459)
QIPQQAGRPALSAQHTPAPTPPLPRSHLDRGVGV,;
CCDS31340.1, Del, C_7,
(SEQIDNO: 4460)
RAPQGPRSPSTSGSLRWCWRKSGRASSQTRTHTW,;
CCDS11177.1, Del, C_7,
(SEQIDNO: 4462)
TSRGSSLQASSWKMAALFLTTTSRKSRPCTWSCA,;
CCDS7700.1, Ins, C_7,
(SEQIDNO: 4463)
AAEPGLACGEGGHQEGQRPSPAGLSPWSPHPET,;
CCDS6541.1, Del, C_7,
(SEQIDNO: 4464)
ASSPSLLVGANRSSAMGRTGGGCQWWHHFWVPI,;
CCDS45135.1, Del, C_7,
(SEQIDNO: 4465)
EIRQLSSKSLWRVGPKTRVLNSSKPPLSQIPLR,;
CCDS3760.1, Ins, C_7,
(SEQIDNO: 4467)
GEKVEALCMEEEMVRVTQWPFNWRSRCFGILQK,;
CCDS11558.1, Del, C_7,
(SEQIDNO: 4468)
GPAKLMRPSFASWGTPSNGTRGWSCSSPLRSSG,;
CCDS11098.1, Ins, C_7,
(SEQIDNO: 4469)
GPESGGQAGAGNPSPGHCQMVQRPEWLRIHQQE,;
CCDS2791.1, Ins, C_7,
(SEQIDNO: 4470)
HAHLPGLWHSGTPRWAPAGVGGLWPGWTAPGHC,;
CCDS8343.1, Del, C_7,
(SEQIDNO: 4471)
HLHHHQSFLQQKTNMMNTMRIMLKLVLNYQMKG,;
CCDS3370.2, Del, C_7,
(SEQIDNO: 4472)
HRAAPATVRPGTQAARRPPGVPLAGWARDGGAW,;
CCDS13418.1, Del, C_7,
(SEQIDNO: 4473)
KASLGAPVRSSARGQDRRKTTLKAPLYPPPLSS,;
CCDS12601.1, Ins, C_7,
(SEQIDNO: 4474)
KPGLHCGHQHNPTCSHHSAQGPASPCHCHPSPD,;
CCDS45376.1, Ins, C_7,
(SEQIDNO: 4475)
LHLGGTPCGGRGLCAALRGRGRQHHTEAQDPVL,;
CCDS7357.1, Ins, C_7,
(SEQIDNO: 4476)
PALPPPGHAQQHGRPRETPQPPHAGNYATRWQL,;
CCDS44236.1, Del, C_7,
(SEQIDNO: 4477)
PGRCRLTLCPRDSRLSWLTDPIPLPALCPLTRW,;
CCDS1155.1, Ins, C_7,
(SEQIDNO: 4478)
PLPLWDEPPRLCCRQEEEPPMDQAAPSGCGTHL,;
CCDS32861.1, Ins, C_7,
(SEQIDNO: 4480)
QAQRLHHGQVAPGLRGLHRRRLQTADRGKALRH,;
CCDS8421.1, Ins, C_7,
(SEQIDNO: 4481)
QHPLRVAYPGGHRPCNTAQDRSPQHRECGLLPF,;
CCDS43002.1, Del, C_7,
(SEQIDNO: 4482)
QLRTTCSPSMAGASGRRSPSPASSGENTSPSCR,;
CCDS58576.1, Ins, C_7,
(SEQIDNO: 4483)
REPRSSDPAQPWYLPPEEGSVQRLQGSLGLWPP,;
CCDS54954.1, Ins, C_7,
(SEQIDNO: 4484)
RLQPACADLLPAVSPGTQRLGRRPFSKWTGVAG,;
CCDS34137.1, Ins, C_7,
(SEQIDNO: 4485)
RNGDLYCVPHQGAGGHRDCGPEFWEHPCFRGLW,;
CCDS45930.1, Ins, C_7,
(SEQIDNO: 4486)
RPLPDVPAGPSLAQELQGENDHEDISSAQLGVP,;
CCDS44233.1, Del, C_7,
(SEQIDNO: 4487)
RSCLPHQLHPWGPSCLLCLGTIVPLPCAPSSPG,;
CCDS858.1, Ins, C_7,
(SEQIDNO: 4488)
RWRLGLGSGNWSFHFHRLLLCISQINYCLLQRD,;
CCDS56095.1, Del, C_7,
(SEQIDNO: 4489)
SIPSPLSLPHPRPPPTAQTPALKAATRLSACQA,;
CCDS13254.1, Del, C_7,
(SEQIDNO: 4490)
WPGTSSGQGVTAMVGGPPMPMPGQREAPGRQEA,;
CCDS54626.1, Ins, C_7,
(SEQIDNO: 4491)
CRHTPRCPRWPPRRGGLHGGDHLRLLRLPSKV,;
CCDS2062.1, Del, C_7,
(SEQIDNO: 4493)
HPTAEKRAPRRQAYYSSPFSLKTSLAQRGKTV,;
CCDS45128.1, Ins, C_7,
(SEQIDNO: 4494)
HQPTRSLPAVGTGWTTVLFFCFLCYQGANVAV,;
CCDS13197.1, Ins, C_7,
(SEQIDNO: 4495)
LDSRCKAGGGSGLETSSQASGPGGGESSEVPM,;
CCDS42714.1, Ins, C_7,
(SEQIDNO: 4496)
LPGCPTEDHGKHRGAEPPLREGPRRHWGRPGA,;
CCDS58503.1, Ins, C_7,
(SEQIDNO: 4497)
PATPTTLRCHTTPYSPHWATNSLPSCASEGGA,;
CCDS9819.1, Ins, C_7,
(SEQIDNO: 4498)
PAVHQSEGGAVPRARGSRRGSLHLSACGTAPS,;
CCDS42587.1, Ins, C_7,
(SEQIDNO: 4499)
PETLGHRWPAAGPQPAPRVPPPLRGPRVASAA,;
CCDS47428.1, Ins, C_7,
(SEQIDNO: 4500)
PPSPSTPTSPSCTSFALCSEGSPSTCWVYKNP,;
CCDS55907.1, Ins, C_7,
(SEQIDNO: 4501)
PTPRSALAGVWGEKPPGGSHLTNARSTSQTEA,;
CCDS361.1, Ins, C_7,
(SEQIDNO: 4502)
QGDPQEEEEILFQEAFQIERPVLQEKSEGGWG,;
CCDS32883.1, Ins, C_7,
(SEQIDNO: 4505)
QVLVVRSICHRAAKDRPAGSGSQGCCLPSFHQ,;
CCDS46911.1, Ins, C_7,
(SEQIDNO: 4506)
RDTRLQKKDSSSWQKGTYRPTGNSRHPRTRWT,;
CCDS43212.1, Ins, C_7,
(SEQIDNO: 4507)
RGGPVHTLAAQQGVTPEFRGDGAPGHQRCGDR,;
CCDS32414.1, Del, C_7,
(SEQIDNO: 4508)
RGRHLLLTAPGAPRGAPAGPVRMGRPTPRAPR,;
CCDS44115.1, Del, C_7,
(SEQIDNO: 4509)
RNRSRCWENACSHSSKQCIQIWLGRSRECCWR,;
CCDS44613.1, Del, C_7,
(SEQIDNO: 4510)
RVQKMIGTFLNEHYQGGQLHLSLAVLLLELSP,;
CCDS10410.1, Del, C_7,
(SEQIDNO: 4511)
SCSHRCLRLPSRHPLPAAGEPPRARAGLGPPA,;
CCDS56581.1, Del, C_7,
(SEQIDNO: 4512)
SHCQLCSPVARLTWRRPGPKEAISASTRRQLS,;
CCDS5187.1, Del, C_7,
(SEQIDNO: 4513)
SSVAGPPPVIILAMPSATATATNAFSSSRCMA,;
CCDS41294.1, Del, C_7,
(SEQIDNO: 4515)
CLLIYLQSLHAPLHSLLRLFKLCQKLSFHHP,;
CCDS11253.1, Del, C_7,
(SEQIDNO: 4516)
CPLILSHQAPNPVARLKSQISVQIALTFLVP,;
CCDS42519.1, Del, C_7,
(SEQIDNO: 4517)
EQRREKGLSSPKHGFGIVSTSVTHLVRGHSV,;
CCDS58033.1, Del, C_7,
(SEQIDNO: 4518)
IHHLPGTIPLSSGARMCLLSQAPPAGSGGRR,;
CCDS11439.1, Del, C_7,
(SEQIDNO: 4519)
ILRTPLVLAPRGAHRLAPKNPPRARGPREPL,;
CCDS12326.1, Ins, C_7,
(SEQIDNO: 4520)
LPGRKPVCKWRSLHPAALPGGCLPVPAWLGG,;
CCDS34863.1, Ins, C_7,
(SEQIDNO: 4522)
PRTCCHRTPWLCKPVPPWDCGGSEAKGKDLF,;
CCDS45128.1, Del, C_7,
(SEQIDNO: 4523)
PTHPEPASCGNWMDDSSFLLFPVLPRGQRCC,;
CCDS6882.1, Ins, C_7,
(SEQIDNO: 4524)
QLLQPAAPPPAHALPLLRAQGAGRMCHLHPE,;
CCDS7626.1, Del, C_7,
(SEQIDNO: 4525)
RGRTWQQTWGSRHSSWTKISRESHPAQGKAG,;
CCDS12143.1, Ins, C_7,
(SEQIDNO: 4526)
RHVPVQPVRVSADRPADTPAPSPSKDLLSHP,;
CCDS34004.1, Del, C_7,
(SEQIDNO: 4527)
RRRRSAAALAAAAELARPRLLVGWCESATCS,;
CCDS58103.1, Del, C_7,
(SEQIDNO: 4528)
RTAGTAAATLPPASWLRGPSVRTVPAARSAR,;
CCDS7332.1, Del, C_7,
(SEQIDNO: 4529)
SIFSTWIIPANVWMLMTALSYPWALMNSWPL,;
CCDS30673.1, Del, C_7,
(SEQIDNO: 4530)
SQDLLQKVTLPPHHHQCQPWSPTLPRTPLLP,;
CCDS41878.1, Del, C_7,
(SEQIDNO: 4531)
VKPNMPFIVSMRYFLVKRPSLHRYLSLCIRA,;
CCDS43544.1, Ins, C_7,
(SEQIDNO: 4532)
WKATQPWGLPGWPPAHGLVLLAHASQHSTWP,;
CCDS44755.1, Del, C_7,
(SEQIDNO: 4533)
AATRSLPCPGGRTVQDSRKRKEGSRSVEGS,;
CCDS45523.1, Del, C_7,
(SEQIDNO: 4534)
EKGLRGRSWDPESYVTVRGRASRQERAPVW,;
CCDS31328.1, Ins, C_7,
(SEQIDNO: 4535)
GGCPTTSQLPTYSQGLPANTSHGQVRQDPV,;
CCDS10544.1, Del, C_7,
(SEQIDNO: 4536)
GPWQSWPSWPGSWAADIKVPYRRTSSHPQT,;
CCDS8844.1, Ins, C_7,
(SEQIDNO: 4537)
GTLSRASTTPHALCQQRLRPFLHADHRAGC,;
CCDS58245.1, Del, C_7,
(SEQIDNO: 4538)
IAALSLMNYILGLSRTSSLKLPKSQNLKSA,;
CCDS31272.1, Del, C_7,
(SEQIDNO: 4539)
LHLGWAQGRALGWLWGEQPSTPRQTWTRCP,;
CCDS42514.1, Ins, C_7,
(SEQIDNO: 4540)
LPEPPSPGPLQPKRKPQWPEQPQSRSREHQ,;
CCDS4665.1, Del, C_7,
(SEQIDNO: 4541)
LTRPWSSRHSASCHRNSLSPSQFSPAWALS,;
CCDS45958.1, Del, C_7,
(SEQIDNO: 4542)
NPFPNLARPGGASPMERLSVQETLLPQPPK,;
CCDS59351.1, Ins, C_7,
(SEQIDNO: 4543)
PDSCSRGGSSLLLGAPNPIPAWTPERVCQQ,;
CCDS47526.1, Ins, C_7,
(SEQIDNO: 4544)
PEASPSHPGSSEKPQPVPPPRAPLVPQPKP,;
CCDS34637.1, Ins, C_7,
(SEQIDNO: 4546)
PRWGPRVAAELGSHEGGAEGQHHGRHRGPA,;
CCDS10679.1, Ins, C_7,
(SEQIDNO: 4547)
PTSGAPTAAISGSHGSYPGTEGPGQAIYLH,;
CCDS41580.1, Ins, C_7,
(SEQIDNO: 4548)
QLSGWPGGDTHAGLLHPGRPLPHGHPARGQ,;
CCDS45403.1, Ins, C_7,
(SEQIDNO: 4549)
QQRGLQPPGCGRCPDGSAQPRAQVQTSLLL,;
CCDS12929.1, Ins, C_7,
(SEQIDNO: 4550)
QVRAGAPTGAGAGGDSPSRQQWRERPPPDR,;
CCDS12090.2, Del, C_7,
(SEQIDNO: 4551)
RRWCGRARAAGARARASAPSWLTRMARKWP,;
CCDS48197.1, Del, C_7,
(SEQIDNO: 4552)
RSHLTSAVPSASIRPLIWTPCRYMSWSALS,;
CCDS58110.1, Del, C_7,
(SEQIDNO: 4553)
SAGVLRGSKRTGPACMPTKRRTVMKSTWRS,;
CCDS32732.1, Del, C_7,
(SEQIDNO: 4554)
SPLHPHPGEKWREGHRAPSSTGFSVSLRPL,;
CCDS8521.2, Del, C_7,
(SEQIDNO: 4555)
SPSSLLSPCNASIMCPLNPAAQDGARCPSC,;
CCDS56148.1, Ins, C_7,
(SEQIDNO: 4556)
SSSASSASAATSPLRRDCLSRGAREVLRIR,;
CCDS55185.1, Del, C_7,
(SEQIDNO: 4557)
SSSRSPTPRPSGPRSSASSPCIPISTPSTT,;
CCDS13948.1, Del, C_7,
(SEQIDNO: 4559)
VPAPSSAGSVRKTPHPLRDPSAACQTSQGV,;
CCDS58576.1, Ins, C_7,
(SEQIDNO: 4560)
WWRRVCAQLLPCRLPLRASPLPGAPSQVPI,;
CCDS12665.1, Ins, C_7,
(SEQIDNO: 4561)
YSCPPGSTEVGKIPEKQRCPQPLTRSRYGE,;
CCDS58553.1, Del, C_7,
(SEQIDNO: 4562)
DKSPSSPLPLVPLDSRPYSPFPGQSNGIS,;
CCDS31473.1, Del, C_7,
(SEQIDNO: 4563)
GLTMSPLWPSCPWTGCRCWKPCAGTGLAP,;
CCDS3324.1, Del, C_7,
(SEQIDNO: 4564)
GTSYTSQAWGHQWRWWTWGGLRTGPCAKP,;
CCDS992.1, Del, C_7,
(SEQIDNO: 4566)
MSVLSVGATSCKPIFRPISGRPVCTSLAV,;
CCDS11784.1, Ins, C_7,
(SEQIDNO: 4567)
PAAAPRGPATAGTGAAGTGQRGPAHFIRL,;
CCDS46075.1, Ins, C_7,
(SEQIDNO: 4568)
PAPIPWSSPITNLTTTPGADGCEPGGRPC,;
CCDS8378.1, Ins, C_7,
(SEQIDNO: 4569)
PEPLGSSEGPGHCVRGCAQRQRQRLCVPV,;
CCDS46136.1, Del, C_7,
(SEQIDNO: 4570)
PPTPTPPTLSTRRCPRPACCLSSAPAAPP,;
CCDS10276.1, Ins, C_7,
(SEQIDNO: 4574)
STAPLCPGVPVSSTEGGRKATQLSTNACH,;
CCDS8002.1, Ins, C_7,
(SEQIDNO: 4575)
TDGLLYLCSSEMLFPRPVVRRRGCVQWGW,;
CCDS2670.2, Ins, C_7,
(SEQIDNO: 4576)
TDPGPAAGGGLLHPGPGWLQDLCVAGTHV,;
CCDS9409.1, Del, C_7,
(SEQIDNO: 4577)
TPSRWTARTQMMWYQLAKEEPGVGACALD,;
CCDS31143.1, Del, C_7,
(SEQIDNO: 4578)
AACWAAPPPASDASPGPRPGPAQKAGSV,;
CCDS45510.1, Ins, C_7,
(SEQIDNO: 4579)
ATACGCGAGHPGRERELQPRGAQECPTA,;
CCDS32598.1, Del, C_7,
(SEQIDNO: 4580)
AVLLPKCRVSSGAAGTRNRTKSQVRRQP,;
CCDS31796.2, Del, C_7,
(SEQIDNO: 4581)
CHLASCPQCFHQWGRHHHSHRYQEWYLR,;
CCDS11637.1, Ins, C_7,
(SEQIDNO: 4582)
FPLQLRLVVSSNQVSGDLSSCYPKRNPL,;
CCDS9266.1, Ins, C_7,
(SEQIDNO: 4583)
HGGCREEEVRGPAGGDPRGALLHRAPRG,;
CCDS59406.1, Del, C_7,
(SEQIDNO: 4584)
KPSHPCPHLPHRPQPGRLGAWAPPGCSW,;
CCDS42268.1, Del, C_7,
(SEQIDNO: 4585)
LLSQTPRLPPCLHTEEPSHWTGGPRSPP,;
CCDS53578.1, Ins, C_7,
(SEQIDNO: 4586)
LRLHCQHSSLQGHEKEPLLTKSWGALVY,;
CCDS3104.1, Ins, C_7,
(SEQIDNO: 4588)
PGGPRASGFQLSRPVRSRICCRLPATDE,;
CCDS46085.1, Ins, C_7,
(SEQIDNO: 4589)
PGPEGGLPSGNPWSDPQDCRGRHWRCLR,;
CCDS44578.1, Del, C_7,
(SEQIDNO: 4590)
PMPPPPRRPLPPPPRAAQRTVTRGKRLN,;
CCDS45399.1, Del, C_7,
(SEQIDNO: 4591)
PRPSPLLQRWKRLGRSSVRPSSSSTCTG,;
CCDS58443.1, Ins, C_7,
(SEQIDNO: 4592)
PRRGAPEWGACTLSFHTLTLPLHRTPPR,;
CCDS32054.1, Ins, C_7,
(SEQIDNO: 4593)
QDHTSRTWSTQYASTWDSSGEWDGHPPG,;
CCDS54706.1, Del, C_7,
(SEQIDNO: 4595)
RKAWAPPPCTRSPASRSSDRCPWSPTRP,;
CCDS450.1, Ins, C_7,
(SEQIDNO: 4596)
RNSRAPRLARRQRRQGLPREDRAPRQSG,;
CCDS54914.1, Del, C_7,
(SEQIDNO: 4597)
RRTSWPSALAYLKVQTPQKRNSSQNQNT,;
CCDS47494.1, Del, C_7,
(SEQIDNO: 4599)
SLLRISALLPQTLQLSSSALELTCPSLP,;
CCDS11784.1, Del, C_7,
(SEQIDNO: 4600)
SSSPPWPSNRRHRGRRHRAARPSSFHST,;
CCDS346.2, Del, C_7,
(SEQIDNO: 4601)
STAARPARVLSCRLSSAVWLPARWKASG,;
CCDS276.1, Ins, C_7,
(SEQIDNO: 4602)
TDAPSGPGLPAPEEPITVSGPTVSQGPI,;
CCDS14010.1, Del, C_7,
(SEQIDNO: 4603)
TPVLPQGCSLSLLHTTFPHRQVPHILDW,;
CCDS44281.1, Del, C_7,
(SEQIDNO: 4604)
VWRHLRRSWRNSLGCSTMEGRRKPWSGP,;
CCDS44650.1, Del, C_7,
(SEQIDNO: 4605)
WHTPHLRTRQAMVTNPSHQALAGGRGPP,;
CCDS14003.1, Del, C_7,
(SEQIDNO: 4606)
YAASPLPIAAPARAPLGPVGWHVRTAPH,;
CCDS7083.1, Del, C_7,
(SEQIDNO: 4607)
AACWAAPPPASDASPGPRPGPAQAGSV,;
CCDS14091.2, Del, C_7,
(SEQIDNO: 4608)
AGSTGASRPLRTRRTRSQCRRSWSPAR,;
CCDS11420.1, Del, C_7,
(SEQIDNO: 4609)
GALLPGSPLSFSFPHWEPLDLRTSVPG,;
CCDS7045.1, Ins, C_7,
(SEQIDNO: 4610)
HRQLQHPGLRQVQRDLRSGLPARAHGV,;
CCDS32732.1, Ins, C_7,
(SEQIDNO: 4611)
LLPSTLTPGRSGERATEPPAAPAFPCP,;
CCDS398.1, Ins, C_7,
(SEQIDNO: 4612)
PAAGVPGTSPAWHWHCGETNQAPGQLL,;
CCDS2781.2, Ins, C_7,
(SEQIDNO: 4613)
PALQLHDSAVLFEQRHWWGRDCFPCSR,;
CCDS45980.1, Ins, C_7,
(SEQIDNO: 4614)
PAPHRRKWKRRRRSGTSTTRCSWTWSM,;
CCDS45979.1, Ins, C_7,
(SEQIDNO: 4615)
PAPHRRNPESRSAGRPGPPQSSPACLC,;
CCDS32041.1, Ins, C_7,
(SEQIDNO: 4616)
PPWEQHSHPGQSRDLRAIPTESCSSPE,;
CCDS42665.1, Ins, C_7,
(SEQIDNO: 4617)
QREWRCLLCGPAWTCFQKGLLHVRKQL,;
CCDS45871.1, Ins, C_7,
(SEQIDNO: 4618)
RMEEGGSDPKIWAKCWQERCLLLQSKW,;
CCDS8917.1, Del, C_7,
(SEQIDNO: 4619)
RPPGACWALLSVGSSPPMLAEASTQTS,;
CCDS33876.1, Ins, C_7,
(SEQIDNO: 4620)
RPWHEPRAAGLLRFSFLCTAWSPGLWT,;
CCDS45176.2, Del, C_7,
(SEQIDNO: 4621)
TSPATRFYRTWPLPGPHAWTSTPRTPT,;
CCDS8666.1, Ins, C_7,
(SEQIDNO: 4622)
WAVPTSSLAKPWGFKCPTQLDSATQGG,;
CCDS55513.1, Ins, C_7,
(SEQIDNO: 4623)
WHTGIHYVTTRFHPICGIKEKRVPLSC,;
CCDS9989.2, Del, C_7,
(SEQIDNO: 4624)
WREAWRRSSWPRWTMAWAQHGSPAIGG,;
CCDS45637.1, Ins, C_7,
(SEQIDNO: 4625)
ECDRVYLNYPPFNGGHSAAQPASGPE,;
CCDS9592.1, Ins, C_7,
(SEQIDNO: 4626)
GSSGPWAWFGSPRQPRGGGGAGTGRG,;
CCDS47235.1, Ins, C_7,
(SEQIDNO: 4627)
HTGAGTLRFAIPRPFTPRTGRLLRRS,;
CCDS48134.1, Del, C_7,
(SEQIDNO: 4628)
LWCCIVFSGSGPSGMRICCGPRCWKP,;
CCDS44254.1, Ins, C_7,
(SEQIDNO: 4629)
PACHRVAALWIPASHLHPVRPLLSPN,;
CCDS33927.1, Ins, C_7,
(SEQIDNO: 4630)
PASRRGEKGASTSPTSACLLHSETNL,;
CCDS33602.1, Ins, C_7,
(SEQIDNO: 4631)
PAVPAARPAQLTAQLQRQLWPCPISQ,;
CCDS41290.1, Del, C_7,
(SEQIDNO: 4632)
PGPLKIRASASRGDTAVREASSLLKS,;
CCDS1075.1, Ins, C_7,
(SEQIDNO: 4633)
PGSWLPTPRQHELSQPTLQPASGSKL,;
CCDS31013.1, Ins, C_7,
(SEQIDNO: 4634)
PWWGPVRDGLCAQGRKPHPPGHGLLH,;
CCDS32928.1, Ins, C_7,
(SEQIDNO: 4635)
RNLLHLAPASPGGPESPAGLLPGAAS,;
CCDS42523.1, Del, C_7,
(SEQIDNO: 4636)
RPPRSPGPAPLGDPRAAPPGSSGSFW,;
CCDS42103.1, Del, C_7,
(SEQIDNO: 4637)
RRPPKPDQALPRPLGDLMVQPQLRPR,;
CCDS6870.1, Del, C_7,
(SEQIDNO: 4638)
SGLSRAFTWPCCGSPASTSPSSSASP,;
CCDS12328.1, Del, C_7,
(SEQIDNO: 4639)
SHNPHPLQLPSPYRATHPSSRPPHSL,;
CCDS12013.1, Ins, C_7,
(SEQIDNO: 4640)
TAPDAQAAQLPVVREDLLLGQRPADP,;
CCDS994.1, Del, C_7,
(SEQIDNO: 4642)
VVLRLGNLPPFFRGSEVPFPRPCRTK,;
CCDS59420.1, Del, C_7,
(SEQIDNO: 4643)
WQTSTLALITSNIRENVLWDFWDHGG,;
CCDS45376.1, Del, C_7,
(SEQIDNO: 4644)
ASRWNPLRRTRALRGPPRQRAAAPH,;
CCDS463.1, Ins, C_7,
(SEQIDNO: 4645)
CASPEKPLNAFCRLHYQHPPPPLPR,;
CCDS9392.1, Ins, C_7,
(SEQIDNO: 4646)
CHHPATGHHTAPRPASIAGLRTNRI,;
CCDS941.1, Del, C_7,
(SEQIDNO: 4647)
EGLHSDLPWVTQVLCLRMVCVDLLH,;
CCDS12793.1, Del, C_7,
(SEQIDNO: 4648)
KTGVSQAPQASCPTSTPTPRPGYPP,;
CCDS44216.1, Ins, C_7,
(SEQIDNO: 4649)
LGSLTQRHHQPEWYNLTESPARLSA,;
CCDS5721.1, Del, C_7,
(SEQIDNO: 4650)
LLSCPATRGSRLPILMVHTSSHQRG,;
CCDS13906.1, Ins, C_7,
(SEQIDNO: 4651)
LLTSSFCAPRTQQLHALHWNRRVFL,;
CCDS4317.1, Ins, C_7,
(SEQIDNO: 4652)
LLVSNHQGEQRLCLPSDPGWMAGDC,;
CCDS13498.1, Ins, C_7,
(SEQIDNO: 4653)
LTPAAPLPWWLEGHHREATGRPRGG,;
CCDS46143.1, Ins, C_7,
(SEQIDNO: 4654)
PAAPLGPQPCPQSLSQRLQSRRPPP,;
CCDS1547.1, Ins, C_7,
(SEQIDNO: 4655)
PAARRPYPEALADGARLARLFLRVL,;
CCDS46659.1, Ins, C_7,
(SEQIDNO: 4656)
PGACSAPQRGGAEVVCGERGGDSLC,;
CCDS45225.1, Ins, C_7,
(SEQIDNO: 4657)
PPWSRALRASPWPWPRSPTPWSTSL,;
CCDS5696.1, Del, C_7,
(SEQIDNO: 4658)
PRPPCSPAPPRTRPCLTPWCTRRSR,;
CCDS45937.1, Ins, C_7,
(SEQIDNO: 4659)
PTSASTPILEPWLYTRVWVRVWPHA,;
CCDS6415.1, Ins, C_7,
(SEQIDNO: 4660)
QLSVVSPWPPLFLGPHQHPEGFPGI,;
CCDS10666.1, Del, C_7,
(SEQIDNO: 4661)
QPSLGPPRLRMVRRWTAMTRMMPPP,;
CCDS10857.1, Ins, C_7,
(SEQIDNO: 4662)
QSPHHAGRPQSPHHAGHLRSLDHTQ,;
CCDS32553.2, Ins, C_7,
(SEQIDNO: 4663)
RLPPLPAAAAAAATAAPAAAAPAAR,;
CCDS10677.1, Ins, C_7,
(SEQIDNO: 4665)
RRGRQRRLQKHLLRHHARRRQGPGV,;
CCDS9756.1, Del, C_7,
(SEQIDNO: 4666)
RYHVRIFLVSQGLNHLNLTKMKSTF,;
CCDS9746.1, Del, C_7,
(SEQIDNO: 4667)
SKLTEIEMQYLKFKQKRNPLDFLFL,;
CCDS13098.1, Del, C_7,
(SEQIDNO: 4668)
SPQKHLRICTSLGLWLIKPSSMQVG,;
CCDS47048.1, Del, C_7,
(SEQIDNO: 4669)
GPAGPPPPLRRRRRPARPPHPRAT,;
CCDS5809.1, Del, C_7,
(SEQIDNO: 4670)
IPYQMWLKCSGRSCRLTDRLFVDG,;
CCDS7101.1, Ins, C_7,
(SEQIDNO: 4671)
KQPPPHPNLADWRSNRKLTHSGWV,;
CCDS32598.1, Ins, C_7,
(SEQIDNO: 4672)
KQYCCQSAECHQAPPAPETGRRAK,;
CCDS6575.1, Del, C_7,
(SEQIDNO: 4673)
LLKLTWIMWSLKSTDTCRRSSGAG,;
CCDS46221.1, Del, C_7,
(SEQIDNO: 4674)
MTPGPGAGPAACSSCAPALCAAAA,;
CCDS117.2, Ins, C_7,
(SEQIDNO: 4675)
PAICAPGQNALQELLLEDLLLLQI,;
CCDS7929.1, Ins, C_7,
(SEQIDNO: 4677)
PNPAPAQPGTTGHDREARRCPATV,;
CCDS2531.1, Ins, C_7,
(SEQIDNO: 4678)
PPGDLHRCARSRGPEADSEERRST,;
CCDS9392.1, Del, C_7,
(SEQIDNO: 4679)
PPPSHRAPHSPPPSQHRRAQDQPH,;
CCDS3020.1, Del, C_7,
(SEQIDNO: 4680)
PQSPRGKSSRQACCTWWGTTSGRP,;
CCDS45277.1, Ins, C_7,
(SEQIDNO: 4681)
PVWGAERSQHSHGAGQAPAALPLL,;
CCDS8662.1, Ins, C_7,
(SEQIDNO: 4682)
QHWHCCHPRGHFRRGGHQGCPRER,;
CCDS54035.1, Ins, C_7,
(SEQIDNO: 4683)
RGSFPRQRPCQRIPQTRRTEKHPP,;
CCDS33928.1, Ins, C_7,
(SEQIDNO: 4684)
RPPERGTEHLPAPPASRRGEKTNL,;
CCDS403.1, Ins, C_7,
(SEQIDNO: 4685)
RPPWSSWLRQTWFGWASWGPRRQG,;
CCDS32744.1, Del, C_7,
(SEQIDNO: 4686)
SLPATSEGSHTQPPLSPPMGCKSL,;
CCDS32861.1, Del, C_7,
(SEQIDNO: 4687)
SSTPSSWTSRSWTTRSPSTPTANC,;
CCDS34390.1, Del, C_7,
(SEQIDNO: 4688)
TLILTDFATWSQQTISGMQGTSKQ,;
CCDS45225.1, Del, C_7,
(SEQIDNO: 4689)
TMVQGPAGLPLAMAQVTHPLVHIT,;
CCDS8421.1, Del, C_7,
(SEQIDNO: 4690)
TPTACGISRWPQTMQYSSRSKPSA,;
CCDS10677.1, Del, C_7,
(SEQIDNO: 4691)
TWAATSTTKTSATSSRTATPRTRS,;
CCDS2030.1, Del, C_7,
(SEQIDNO: 4692)
VSVYSGNLLSFSRRGMKSSVRLKN,;
CCDS34562.1, Del, C_7,
(SEQIDNO: 4693)
ASAPTSPLPSSPPSSPQFQIRTT,;
CCDS1646.1, Del, C_7,
(SEQIDNO: 4694)
ATPLRGAETPKAASSVSARTPTS,;
CCDS1661.1, Del, C_7,
(SEQIDNO: 4695)
FLHGMLAKFRQPPLLTPCGRQTL,;
CCDS2027.1, Del, C_7,
(SEQIDNO: 4696)
GNLSPWLSRSPRPRWSLWAWRCS,;
CCDS11218.1, Del, C_7,
(SEQIDNO: 4697)
GTWTPGPSSPLETETLRWRLMTW,;
CCDS43455.1, Ins, C_7,
(SEQIDNO: 4698)
HLSNISRPHPFIHSGHGTCCAEEE,;
CCDS8844.1, Del, C_7,
(SEQIDNO: 4699)
HPLQSLHFIPPCSLSAATQAIPPR,;
CCDS55088.1, Ins, C_7,
(SEQIDNO: 4700)
HTIQHASVPTASCISKLNSYTET,;
CCDS45696.1, Ins, C_7,
(SEQIDNO: 4701)
HWRRGVPYSLQDSGDAHCPRVLT,;
CCDS44925.2, Del, C_7,
(SEQIDNO: 4702)
IFPFLWALILHLYIRVLLVLSNF,;
CCDS47954.1, Del, C_7,
(SEQIDNO: 4703)
KSPHSWKTSGPCSLPLDRTFLQC,;
CCDS11627.2, Ins, C_7,
(SEQIDNO: 4704)
LQGASQRPGQEGQVYPADGHCSR,;
CCDS2934.1, Del, C_7,
(SEQIDNO: 4705)
MPTGLRKARMEGQPMRCLHLPPS,;
CCDS4266.1, Del, C_7,
(SEQIDNO: 4706)
NHPDPSARACWSCVDTRPRCLLP,;
CCDS47918.1, Del, C_7,
(SEQIDNO: 4707)
NQKIRSSSRPGGAEKEPIFQKQA,;
CCDS10630.1, Ins, C_7,
(SEQIDNO: 4708)
PELPPPVGGHSSATFEPWTPGQL,;
CCDS47413.1, Ins, C_7,
(SEQIDNO: 4709)
PGRQERLRGPPSLSFCHRSDRNR,;
CCDS3607.1, Del, C_7,
(SEQIDNO: 4710)
PPRPRRRPPRRPPRLWAPTTQAA,;
CCDS31269.1, Ins, C_7,
(SEQIDNO: 4711)
PRNPSLIAHGTRHPHQLPHRSQQ,;
CCDS10972.1, Del, C_7,
(SEQIDNO: 4713)
PSRHTHIERTGLRRCPTAVFMAA,;
CCDS42824.1, Ins, C_7,
(SEQIDNO: 4714)
RAGVGDHAQKATPQWGALILLGF,;
CCDS42525.1, Ins, C_7,
(SEQIDNO: 4715)
REPWPAIDGDRHRLGAGSAAVPH,;
CCDS47347.1, Del, C_7,
(SEQIDNO: 4716)
RLLARRTAGGQCTMNWRSAGGPS,;
CCDS12065.1, Ins, C_7,
(SEQIDNO: 4717)
RRRQRLWTRAEPQRARVPPLPTL,;
CCDS13670.1, Del, C_7,
(SEQIDNO: 4718)
RSYRFSLTLEAVTLPWQEPRTPT,;
CCDS11785.1, Del, C_7,
(SEQIDNO: 4719)
RYSSWSRTSPASLSWKSQTSTSS,;
CCDS117.2, Del, C_7,
(SEQIDNO: 4720)
SNLRAGTECPAGTSSGRPSPPAN,;
CCDS34434.2, Ins, C_7,
(SEQIDNO: 4721)
SPTTPTPAADYGERRVPKHRRPL,;
CCDS5689.1, Del, C_7,
(SEQIDNO: 4722)
TRCLPATVEPRRPGKRRAGCGRW,;
CCDS47839.1, Del, C_7,
(SEQIDNO: 4723)
TRVHVSSPPSSATLLCWENGSRV,;
CCDS30673.1, Ins, C_7,
(SEQIDNO: 4724)
TTTNVSPGPRHSPGHPSCHEECH,;
CCDS55589.1, Del, C_7,
(SEQIDNO: 4725)
TWKSCTLRPRRGSAPYNTKRNRN,;
CCDS45544.1, Del, C_7,
(SEQIDNO: 4726)
YVSSSSQGLEWLRVKMASWACRS,;
CCDS12196.1, Del, C_7,
(SEQIDNO: 4727)
ASTSGRTRRSAKMSTNACPARV,;
CCDS10630.1, Del, C_7,
(SEQIDNO: 4728)
GATSASGWSFLRHFRALDPRPA,;
CCDS44233.1, Ins, C_7,
(SEQIDNO: 4729)
GGAAFPISFIPGAHPASSAWGR,;
CCDS7537.1, Ins, C_7,
(SEQIDNO: 4730)
GLRFALSPGTARHLRRVPPPLP,;
CCDS1821.1, Ins, C_7,
(SEQIDNO: 4731)
GRVVHVPAAHPQLLAGAGGQRL,;
CCDS58097.1, Del, C_7,
(SEQIDNO: 4733)
HLSQVKGPVNWKDAQVPRLRFN,;
CCDS33007.1, Ins, C_7,
(SEQIDNO: 4734)
HPQWNHIPQIRRLQRLLAGQGD,;
CCDS12090.2, Ins, C_7,
(SEQIDNO: 4735)
LDAGVEGPEQLGHGRELPHRPG,;
CCDS32548.1, Ins, C_7,
(SEQIDNO: 4736)
LGGQRMPAAHHQESPVRSPESG,;
CCDS11733.2, Ins, C_7,
(SEQIDNO: 4737)
LPCPRLRHPPSCLPALQAGPAD,;
CCDS32409.1, Del, C_7,
(SEQIDNO: 4738)
NLLVSTQLGTAASPTQHQQLPR,;
CCDS3541.1, Del, C_7,
(SEQIDNO: 4739)
NSQILTSHLNIQIKIAVWSTLP,;
CCDS12065.1, Del, C_7,
(SEQIDNO: 4740)
PAAAALDEGRTTTCKGSTPTDA,;
CCDS44112.1, Ins, C_7,
(SEQIDNO: 4741)
PAGCLRQRRLSKGCWRWSCGAL,;
CCDS8944.1, Ins, C_7,
(SEQIDNO: 4742)
PALCPECPPTWTTYLQCHHGNY,;
CCDS12160.1, Ins, C_7,
(SEQIDNO: 4743)
PEATPAQQQGVRPEEPRVLQQA,;
CCDS13401.1, Ins, C_7,
(SEQIDNO: 4744)
PGTAEHCAHRLWAEFHFSTSRG,;
CCDS45171.1, Del, C_7,
(SEQIDNO: 4746)
PHPRGSPAWSRGAARPRPLRML,;
CCDS32581.1, Ins, C_7,
(SEQIDNO: 4747)
PPQAALVGGRLEGHSGQQAALL,;
CCDS45671.1, Del, C_7,
(SEQIDNO: 4748)
QAAVAPASAPAPTEAARPPTPR,;
CCDS13418.1, Ins, C_7,
(SEQIDNO: 4749)
QKPPWEHQSEVQHGDKIGEKPL,;
CCDS42519.1, Ins, C_7,
(SEQIDNO: 4750)
QNREEKKDFLPRNMDLALSQHQ,;
CCDS44299.1, Ins, C_7,
(SEQIDNO: 4751)
QPWRPHAGPAVQPPEPASGLPW,;
CCDS6556.1, Ins, C_7,
(SEQIDNO: 4752)
QVREPHVHVLPGHVLHRLPHSV,;
CCDS14649.1, Ins, C_7,
(SEQIDNO: 4753)
RGFTDRFSKTGRSAEPHSGRDT,;
CCDS9991.1, Del, C_7,
(SEQIDNO: 4754)
RRSWWRVPTPPSSTLTSGPTPL,;
CCDS42972.1, Ins, C_7,
(SEQIDNO: 4755)
RTPGTCGLRVGAGRIRPERAGT,;
CCDS628.2, Ins, C_7,
(SEQIDNO: 4756)
SDCCPTKSQVPPLPVTPPYTSS,;
CCDS5702.1, Del, C_7,
(SEQIDNO: 4757)
TGRRRRSYPRSPSPGITTCVMR,;
CCDS32581.1, Del, C_7,
(SEQIDNO: 4758)
AAGCTRGRTTGRPFWTASGPA,;
CCDS414.1, Del, C_7,
(SEQIDNO: 4759)
ARAIATRPGGWNRMGEPRGFC,;
CCDS2446.1, Del, C_7,
(SEQIDNO: 4760)
ARGTSPIRHCSHSSSCSGPSS,;
CCDS56236.1, Del, C_7,
(SEQIDNO: 4761)
CPQWPGQRRLSAGSGVLTAGC,;
CCDS44578.1, Ins, C_7,
(SEQIDNO: 4762)
CQCRHLHAGPFPLLPELHSEL,;
CCDS30880.1, Ins, C_7,
(SEQIDNO: 4763)
FVQLHRHPPPFLQARQPAQSQ,;
CCDS10206.1, Ins, C_7,
(SEQIDNO: 4764)
HRAQRGDRGVSDPVQQQPHAA,;
CCDS4832.1, Ins, C_7,
(SEQIDNO: 4765)
NDCPGENPPRKIPSTSLQPEH,;
CCDS2062.1, Ins, C_7,
(SEQIDNO: 4766)
NTPQQRKGHPDVRLTTAAPSL,;
CCDS3324.1, Ins, C_7,
(SEQIDNO: 4767)
PAPPTPPRPGGTSGGGGHGGD,;
CCDS13227.1, Ins, C_7,
(SEQIDNO: 4768)
PEEGSPPQLRQWWAQGADPLA,;
CCDS41837.1, Del, C_7,
(SEQIDNO: 4769)
PKCRVPAPLLTWLEPCTPVPR,;
CCDS42518.1, Ins, C_7,
(SEQIDNO: 4770)
PWLQRAAPTHAATGPTPHQPR,;
CCDS46682.1, Ins, C_7,
(SEQIDNO: 4771)
QGRGFPGGPCGAVSNRRDCRG,;
CCDS31013.1, Del, C_7,
(SEQIDNO: 4772)
QPACLSSAPSTLRIVTGPSTT,;
CCDS2063.1, Ins, C_7,
(SEQIDNO: 4773)
QPGRCVSLSGHFHNVSKQATL,;
CCDS32414.1, Ins, C_7,
(SEQIDNO: 4774)
RGAGTSFSQPPGHQEARQLGQ,;
CCDS45766.1, Del, C_7,
(SEQIDNO: 4775)
RPKEVAETLSFRIPGTQRQYL,;
CCDS11253.1, Ins, C_7,
(SEQIDNO: 4776)
RTFICPQGTRNEQRQREIQWV,;
CCDS44112.1, Del, C_7,
(SEQIDNO: 4778)
SRLSPPEAAFQRMLAMELRSP,;
CCDS41346.1, Ins, C_7,
(SEQIDNO: 4779)
VDRPQHTEWLSWSNLYRIRHQ,;
CCDS9999.1, Del, C_7,
(SEQIDNO: 4780)
AGRAAPAPSPRTAAACPTPV,;
CCDS32045.1, Del, C_7,
(SEQIDNO: 4782)
GVRAQPSVEWQKVARQLACN,;
CCDS54132.1, Ins, C_7,
(SEQIDNO: 4783)
HAAGLHLSRGHQSSSQQWQL,;
CCDS8162.1, Ins, C_7,
(SEQIDNO: 4784)
HRGAPQAPTRLHLLPGHPLL,;
CCDS47396.1, Ins, C_7,
(SEQIDNO: 4785)
HTRLGQTHQHPGLQWGLYGA,;
CCDS45544.1, Del, C_7,
(SEQIDNO: 4786)
KMSACLSPASSLAHSWMPGV,;
CCDS34137.1, Del, C_7,
(SEQIDNO: 4787)
KWRSVLCTSPRSWGTQRLWA,;
CCDS14078.1, Del, C_7,
(SEQIDNO: 4788)
LIHCYMALCSGPRPRCRPHQ,;
CCDS8260.1, Ins, C_7,
(SEQIDNO: 4789)
QAKSGRNTSMGQSSAETANQ,;
CCDS6026.1, Ins, C_7,
(SEQIDNO: 4790)
QQELHLAAGGPHPVPHLPAV,;
CCDS1051.1, Ins, C_7,
(SEQIDNO: 4791)
QYLHPHRVLSPWEPAGHSGE,;
CCDS377.1, Del, C_7,
(SEQIDNO: 4792)
SPNAAAKRSRRRTRGVRLSL,;
CCDS33007.1, Del, C_7,
(SEQIDNO: 4793)
SPVEPHSANPTSSETSCWPR,;
CCDS33055.1, Ins, C_7,
(SEQIDNO: 4794)
TQAEKRFPYTEKARPMEISV,;
CCDS42723.1, Del, C_7,
(SEQIDNO: 4795)
TSPAPRLNRHPLTSGSWING,;
CCDS12603.1, Del, C_7,
(SEQIDNO: 4796)
APGPSTCGATSVPRRTGCS,;
CCDS11409.1, Del, C_7,
(SEQIDNO: 4798)
AVSAEPGPGTSCATTTMAP,;
CCDS617.2, Ins, C_7,
(SEQIDNO: 4799)
CPCSLTCCPAYCSQQGPWF,;
CCDS14033.1, Ins, C_7,
(SEQIDNO: 4800)
LAEQDRERQPQHRAVGAGV,;
CCDS725.1, Ins, C_7,
(SEQIDNO: 4801)
LDVWAPKSGRAVPSWLSKS,;
CCDS54507.1, Ins, C_7,
(SEQIDNO: 4802)
LQDLSPRHRYWKGKERGDL,;
CCDS10278.1, Del, C_7,
(SEQIDNO: 4803)
LRRPARSWRPCSSTGRARS,;
CCDS730.1, Ins, C_7,
(SEQIDNO: 4804)
PAAGLGRLGPQDFHVFFFN,;
CCDS44228.1, Ins, C_7,
(SEQIDNO: 4805)
PAGGLLRGSWACRERSTHP,;
CCDS50.1, Ins, C_7,
(SEQIDNO: 4806)
PATVRGLPDQQIQEGDLQV,;
CCDS42516.1, Ins, C_7,
(SEQIDNO: 4807)
PDITCQVRGQHLHPQMQVL,;
CCDS5213.1, Ins, C_7,
(SEQIDNO: 4808)
PEATLLYPNSTGNRGANRR,;
CCDS54907.1, Ins, C_7,
(SEQIDNO: 4809)
PEVTHCDGSLSYRFCLPRR,;
CCDS12896.1, Ins, C_7,
(SEQIDNO: 4810)
PGPLPPQRGPRAERRHRPL,;
CCDS33858.1, Ins, C_7,
(SEQIDNO: 4811)
PHYHTQAPQAPRLFPKRGW,;
CCDS7591.1, Ins, C_7,
(SEQIDNO: 4812)
PLFCIKERWTKTFDFDEER,;
CCDS6424.1, Ins, C_7,
(SEQIDNO: 4813)
PRGLPRRPGGGGEPGAAEP,;
CCDS11608.1, Ins, C_7,
(SEQIDNO: 4814)
QGTSEGGRESSGPLHSAAG,;
CCDS7736.1, Ins, C_7,
(SEQIDNO: 4815)
QRGRGPFIHPALRQWRLRRP,;
CCDS58434.1, Del, C_7,
(SEQIDNO: 4816)
RLLLPRMSRRCLPSGSLET,;
CCDS11177.1, Ins, C_7,
(SEQIDNO: 4817)
RPAEAHLCRQAAGRWPHSF,;
CCDS42139.1, Del, C_7,
(SEQIDNO: 4818)
SERKWSWMTLPGSWSMRRT,;
CCDS43455.1, Del, C_7,
(SEQIDNO: 4819)
SIQHLQAPSPSLWPWNMLC,;
CCDS8162.1, Del, C_7,
(SEQIDNO: 4820)
SRGPPGPNEAPPPSWTPAS,;
CCDS42248.1, Del, C_7,
(SEQIDNO: 4822)
VQPALTPRPATGKSTSTSC,;
CCDS44306.1, Del, C_7,
(SEQIDNO: 4823)
VSVSRSPQRVSPMNTEGRP,;
CCDS7967.1, Del, C_7,
(SEQIDNO: 4824)
YIWALSISSTSMIKPLMRN,;
CCDS14616.1, Del, C_7,
(SEQIDNO: 4825)
APLRLWSWCGTSQTYFGS,;
CCDS44963.1, Del, C_7,
(SEQIDNO: 4826)
AQPGVSIRFVHRPFLGRW,;
CCCDS14033.1, Del, C_7,
(SEQIDNO: 4828)
RTRPRKAASAQSSRSGG,;
CCDS3369.1, Del, C_7,
(SEQIDNO: 4829)
GTASPWCWASTSSTARRT,;
CCDS54060.1, Ins, C_7,
(SEQIDNO: 4830)
HFLRRTQAEHTVLLHRRV,;
CCDS30673.1, Del, C_7,
(SEQIDNO: 4831)
HHQCQPWSPTLPRTPLLP,;
CCDS10687.1, Ins, C_7,
(SEQIDNO: 4832)
NEAGVEDRHLRGRAVWGC,;
CCDS34063.1, Ins, C_7,
(SEQIDNO: 4833)
PAAAHRHGPTHEIPSAGLQ,;
CCDS33022.2, Ins, C_7,
(SEQIDNO: 4834)
PAPATTSPSQAAQLCHDG,;
CCDS53838.1, Ins, C_7,
(SEQIDNO: 4835)
PATPTPTSPTCRAHQAAL,;
CCDS7373.1, Ins, C_7,
(SEQIDNO: 4836)
PGPGLLPLSMQLQPPYHG,;
CCDS59018.1, Ins, C_7,
(SEQIDNO: 4837)
PGRQERLRGPPSLSDRNR,;
CCDS6067.1, Ins, C_7,
(SEQIDNO: 4838)
PPPGQPQVFGGCFWFSPN,;
CCDS54707.1, Del, C_7,
(SEQIDNO: 4839)
PRAGPRCHRRRRRCCCCC,;
CCDS6578.1, Ins, C_7,
(SEQIDNO: 4840)
QCLPCSYPCCQPYPAGQL,;
CCDS54772.1, Ins, C_7,
(SEQIDNO: 4841)
QGSASRPLSAPLWRGFLL,;
CCDS45958.1, Ins, C_7,
(SEQIDNO: 4842)
QTPFQTSHAQEEQVRWRG,;
CCDS9261.1, Ins, C_7,
(SEQIDNO: 4843)
RAAPRAAGTGGQGHVEGS,;
CCDS32548.1, Del, C_7,
(SEQIDNO: 4844)
RGTAHARCAPSRESSSES,;
CCDS47413.1, Del, C_7,
(SEQIDNO: 4845)
RKTRAAPRTPLPFFLSQV,;
CCDS34455.1, Ins, C_7,
(SEQIDNO: 4846)
RLPHNPSPFSALPEGEQP,;
CCDS12584.1, Ins, C_7,
(SEQIDNO: 4847)
RLVLPFGSEPQPLLPLGL,;
CCDS46055.1, Del, C_7,
(SEQIDNO: 4848)
RPLPGNGVRKAQNGWCRH,;
CCDS6607.1, Ins, C_7,
(SEQIDNO: 4849)
RWTGQLLSTDADRDGAWE,;
CCDS54686.1, Ins, C_7,
(SEQIDNO: 4850)
SCQLCSHHLCHTGRGPPL,;
CCDS46075.1, Del, C_7,
(SEQIDNO: 4851)
SPDTLVVPHHQPHHHPRS,;
CCDS4798.1, Ins, C_7,
(SEQIDNO: 4852)
TPATSHLQYGLHITEVSG,;
CCDS45399.1, Ins, C_7,
(SEQIDNO: 4853)
TPGPAPSCSGGSGSADRA,;
CCDS44020.1, Del, C_7,
(SEQIDNO: 4855)
VRPTRRAPLTRPPLSLPT,;
CCDS14374.1, Ins, C_7,
(SEQIDNO: 4856)
WLHRLWWPHGAYCVQRCT,;
CCDS56236.1, Ins, C_7,
(SEQIDNO: 4857)
AAHSGQDRGGCRQGRVC,;
CCDS55513.1, Del, C_7,
(SEQIDNO: 4858)
AHRNTLCYDKIPSNLRN,;
CCDS30649.1, Del, C_7,
(SEQIDNO: 4859)
ALGPISCSGASASWPPA,;
CCDS54060.1, Del, C_7,
(SEQIDNO: 4860)
FPSQNSSGTHCTSPPTC,;
CCDS33500.1, Del, C_7,
(SEQIDNO: 4861)
HRAAPLSPQGPRRPPRS,;
CCDS2971.1, Del, C_7,
(SEQIDNO: 4862)
KLPTGPPSPRPPRPQCT,;
CCDS9635.1, Del, C_7,
(SEQIDNO: 4863)
KPAAPRGPIRAKTASIF,;
CCDS7743.1, Del, C_7,
(SEQIDNO: 4864)
MKSFWLPDSLRMEPRAW,;
CCDS3279.1, Ins, C_7,
(SEQIDNO: 4865)
NRLPLQSWAKRICPISS,;
CCDS8944.1, Del, C_7,
(SEQIDNO: 4866)
NSLALCWVPACWVTCLH,;
CCDS5320.1, Ins, C_7,
(SEQIDNO: 4867)
PAGEGPAHPTGAAAALL,;
CCDS42563.1, Del, C_7,
(SEQIDNO: 4868)
PAQLSPLTTSTPCWGIS,;
CCDS32742.1, Ins, C_7,
(SEQIDNO: 4869)
PLLLPLPMQWPPEPQPV,;
CCDS58446.1, Del, C_7,
(SEQIDNO: 4870)
PMGPPPECCSSWLRRIE,;
CCDS53553.1, Del, C_7,
(SEQIDNO: 4871)
PPTARTRCRWNHRSCQA,;
CCDS8932.1, Ins, C_7,
(SEQIDNO: 4872)
QPVLLCQWPLHPHLLDV,;
CCDS1195.1, Ins, C_7,
(SEQIDNO: 4873)
RAPRPPGPNLTPTHDGA,;
CCDS34971.1, Del, C_7,
(SEQIDNO: 4874)
RPASSWCSPSRSVPSAS,;
CCDS361.1, Del, C_7,
(SEQIDNO: 4875)
RRPPRRRRNSLSRSLSN,;
CCDS45930.1, Del, C_7,
(SEQIDNO: 4876)
SATGRSCGTKSRPRTSR,;
CCDS13465.1, Del, C_7,
(SEQIDNO: 4877)
SHRPPRASSAGDLQCQA,;
CCDS42153.1, Del, C_7,
(SEQIDNO: 4878)
SLRRATQSLASGPGRPV,;
CCDS53277.1, Del, C_7,
(SEQIDNO: 4879)
SRTPLCSGRGLSSRNFC,;
CCDS730.1, Del, C_7,
(SEQIDNO: 4880)
SSWARPPRPPGLPRLLF,;
CCDS41294.1, Ins, C_7,
(SEQIDNO: 4881)
TAYSYTSRASTHPSIPC,;
CCDS7357.1, Del, C_7,
(SEQIDNO: 4882)
TCRAIVTMTSCLYLRTT,;
CCDS31911.1, Del, C_7,
(SEQIDNO: 4883)
VISLCQSWMNKSHSHTA,;
CCDS456.1, Del, C_7,
(SEQIDNO: 4884)
AASAWVPRPGTPPARS,;
CCDS2405.1, Del, C_7,
(SEQIDNO: 4885)
APWAASWSRSRAAAAA,;
CCDS56256.1, Ins, C_7,
(SEQIDNO: 4886)
CGSASPHLQQHGGGGL,;
CCDS42972.1, Del, C_7,
(SEQIDNO: 4888)
DHQGSFRLTFFSWRLK,;
CCDS42972.1, Del, C_7,
(SEQIDNO: 4889)
DPRDLWSTCRSRTDPS,;
CCDS1138.1, Del, C_7,
(SEQIDNO: 4890)
GSPTPTPLSASGLRQW,;
CCDS3352.1, Ins, C_7,
(SEQIDNO: 4891)
HASFSGLLPPRLGQNG,;
CCDS10324.1, Ins, C_7,
(SEQIDNO: 4892)
HVSNKPGGDCPVQCSV,;
CCDS5702.1, Ins, C_7,
(SEQIDNO: 4893)
KLEEEGEATPGLQVLA,;
CCDS53257.1, Ins, C_7,
(SEQIDNO: 4895)
PAPGHQHSRLPPRASD,;
CCDS11218.1, Ins, C_7,
(SEQIDNO: 4896)
PEPGLPDLHEIHWRQKL,;
CCDS9121.1, Ins, C_7,
(SEQIDNO: 4897)
PPLLFPATLRPPSAFP,;
CCDS10081.1, Ins, C_7,
(SEQIDNO: 4898)
PPRAPLAQEVPAQGRL,;
CCDS7332.1, Ins, C_7,
(SEQIDNO: 4899)
PVFSAPGSYRQTCGCL,;
CCDS13098.1, Ins, C_7,
(SEQIDNO: 4900)
PVPRSTCGYVPASVSG,;
CCDS48130.1, Ins, C_7,
(SEQIDNO: 4901)
QCKPQGQAKPDQHRGL,;
CCDS54092.1, Ins, C_7,
(SEQIDNO: 4902)
QHPHSRACCCKVQILG,;
CCDS6714.1, Ins, C_7,
(SEQIDNO: 4903)
QRRLVATPLQTAQRRF,;
CCDS47583.1, Ins, C_7,
(SEQIDNO: 4904)
RAWSKKQFTYQFFQTH,;
CCDS2030.1, Ins, C_7,
(SEQIDNO: 4905)
RCRCIQETSCLSQEGG,;
CCDS13227.1, Del, C_7,
(SEQIDNO: 4906)
RGGQPPAVAAVVGARC,;
CCDS58103.1, Ins, C_7,
(SEQIDNO: 4907)
RGLPEPLLQLYHLPAG,;
CCDS11563.1, Ins, C_7,
(SEQIDNO: 4908)
RHASPQGLLGEHLRRG,;
CCDS45769.1, Del, C_7,
(SEQIDNO: 4909)
RIRVSSRAPRPPWCAE,;
CCDS32782.1, Ins, C_7,
(SEQIDNO: 4910)
RPSWPIRSGGAPGPAE,;
CCDS6982.1, Ins, C_7,
(SEQIDNO: 4911)
RRGRPSGSHGRNGPNG,;
CCDS43446.1, Ins, C_7,
(SEQIDNO: 4912)
RRGWLHLSLGPQGRPV,;
CCDS11439.1, Ins, C_7,
(SEQIDNO: 4913)
RSSGLRWSWPREEPTA,;
CCDS12652.2, Ins, C_7,
(SEQIDNO: 4914)
SAHHHLPRTGVGRTEV,;
CCDS8403.1, Ins, C_7,
(SEQIDNO: 4915)
SPPAATHGPSQRAEEI,;
CCDS11627.2, Del, C_7,
(SEQIDNO: 4916)
SRCESAAWTRRPSISC,;
CCDS13839.1, Del, C_7,
(SEQIDNO: 4917)
TMATLTPSSSTTHSGS,;
CCDS6424.1, Del, C_7,
(SEQIDNO: 4918)
TRAPAQTWWRRRARSC,;
CCDS6575.1, Del, C_7,
(SEQIDNO: 4919)
VSGSWSLGHPWCCLGL,;
CCDS1661.1, Ins, C_7,
(SEQIDNO: 4920)
ASSTECWQSSDSLLC,;
CCDS189.1, Del, C_7,
(SEQIDNO: 4921)
CWTSHLMQMTRPWLN,;
CCDS31596.1, Del, C_7,
(SEQIDNO: 4922)
GPQERARAGRTMRAQ,;
CCDS32375.1, Ins, C_7,
(SEQIDNO: 4923)
HDLLPSPAPTQEPLL,;
CCDS3217.1, Ins, C_7,
(SEQIDNO: 4924)
HHQSTSSNTVRRKFM,;
CCDS5309.2, Del, C_7,
(SEQIDNO: 4925)
HPGKWAEGGKTAKRD,;
CCDS30652.1, Ins, C_7,
(SEQIDNO: 4926)
HPPAPASHPAPCQPT,;
CCDS12035.1, Ins, C_7,
(SEQIDNO: 4927)
PAPAPGRGVAPGGGG,;
CCDS44327.1, Del, C_7,
(SEQIDNO: 4928)
PDPGLCAEFPDRLKC,;
CCDS7771.1, Ins, C_7,
(SEQIDNO: 4929)
PEGPGPAGRDTAGHQ,;
CCDS30559.1, Del, C_7,
(SEQIDNO: 4930)
PGSRAHWPPADAATR,;
CCDS14306.1, Del, C_7,
(SEQIDNO: 4931)
PHLCRELHPRYLPVH,;
CCDS1172.2, Ins, C_7,
(SEQIDNO: 4932)
PHSHLDQKGLKYGPE,;
CCDS42402.1, Ins, C_7,
(SEQIDNO: 4933)
PLPPTSPGRDVAQDP,;
CCDS59451.1, Del, C_7,
(SEQIDNO: 4934)
PLRGHLPQFLHHRVW,;
CCDS44963.1, Ins, C_7,
(SEQIDNO: 4935)
PPNPAFPYGLFTGPF,;
CCDS41878.1, Ins, C_7,
(SEQIDNO: 4936)
PSSQICHSLYPCDIF,;
CCDS9991.1, Ins, C_7,
(SEQIDNO: 4937)
QEDPGGGCQRRPPRH,;
CCDS12921.1, Ins, C_7,
(SEQIDNO: 4938)
QGQEAPGHQRDPSAL,;
CCDS11157.1, Ins, C_7,
(SEQIDNO: 4939)
QVRQDRRHGHADAPE,;
CCDS43212.1, Del, C_7,
(SEQIDNO: 4941)
RRPCTYSGSTTRSHS,;
CCDS5696.1, Del, C_7,
(SEQIDNO: 4942)
RTRPCLTPWCTRRSR,;
CCDS45820.1, Ins, C_7,
(SEQIDNO: 4943)
RWRKIFKDGRAYIKH,;
CCDS48134.1, Ins, C_7,
(SEQIDNO: 4944)
SCGAASCSPGAGPLG,;
CCDS46987.1, Ins, C_7,
(SEQIDNO: 4945)
SFSLCTSQGFPFDPK,;
CCDS5721.1, Ins, C_7,
(SEQIDNO: 4946)
SFSVAPQPGGAGFQY,;
CCDS33407.1, Del, C_7,
(SEQIDNO: 4948)
SWSCTRWSLSSSVMK,;
CCDS4317.1, Del, C_7,
(SEQIDNO: 4949)
TRFESPRGTTALPSE,;
CCDS10081.1, Del, C_7,
(SEQIDNO: 4950)
TSCPPRTGSPCPRPT,;
CCDS58576.1, Del, C_7,
(SEQIDNO: 4952)
VAQSLCTASTMPTAT,;
CCDS32555.1, Del, C_7,
(SEQIDNO: 4953)
VLFKADQSESSLSSG,;
CCDS48130.1, Del, C_7,
(SEQIDNO: 4954)
VQTPRPSQAGSAPWS,;
CCDS56256.1, Del, C_7,
(SEQIDNO: 4955)
WIGQPPPTATWRRWI,;
CCDS41618.1, Del, C_7,
(SEQIDNO: 4956)
AMKQIHPLLLPKNS,;
CCDS12922.1, Del, C_7,
(SEQIDNO: 4957)
CGDSSTCAQRWKLS,;
CCDS4457.1, Ins, C_7,
(SEQIDNO: 4959)
DLEHEIGGVTRHRHR,;
CCDS12227.1, Del, C_7,
(SEQIDNO: 4960)
DPMWPPPLSVTMSL,;
CCDS10013.1, Ins, C_7,
(SEQIDNO: 4961)
GCILPFLACDWLGC,;
CCDS10098.1, Del, C_7,
(SEQIDNO: 4962)
GDFVLSRSCSLVGS,;
CCDS46682.1, Del, C_7,
(SEQIDNO: 4963)
GERIPWRSLWSSFE,;
CCDS13197.1, Del, C_7,
(SEQIDNO: 4964)
GFKMQSRRRKWAGN,;
CCDS11194.1, Del, C_7,
(SEQIDNO: 4965)
GLASPLAACRLTSP,;
CCDS53257.1, Del, C_7,
(SEQIDNO: 4966)
GPRPPAQPPPPSGL,;
CCDS3748.1, Del, C_7,
(SEQIDNO: 4967)
GRVGLKPLSGTRWS,;
CCDS1137.1, Ins, C_7,
(SEQIDNO: 4968)
HRGEQRARSKSPPH,;
CCDS45930.1, Del, C_7,
(SEQIDNO: 4969)
KTLNVSACAPRPFW,;
CCDS58599.1, Ins, C_7,
(SEQIDNO: 4970)
LLLQERHQPDRRCG,;
CCDS48064.1, Ins, C_7,
(SEQIDNO: 4971)
LLPLPQLLLLCHLL,;
CCDS55952.1, Ins, C_7,
(SEQIDNO: 4972)
LVHSWAEEAADEAA,;
CCDS47266.1, Ins, C_7,
(SEQIDNO: 4973)
NGDCHGCPEGRQSL,;
CCDS8403.1, Ins, C_7,
(SEQIDNO: 4974)
PAATHGPSQRAEEI,;
CCDS57999.1, Ins, C_7,
(SEQIDNO: 4975)
PAEPLCLLSFGHLS,;
CCDS33692.1, Ins, C_7,
(SEQIDNO: 4976)
PAPHHEFPASAQAG,;
CCDS8083.1, Ins, C_7,
(SEQIDNO: 4977)
PEASWDCRWHSPRP,;
CCDS47347.1, Ins, C_7,
(SEQIDNO: 4978)
PGSWRAGQRAVSAQ,;
CCDS8882.1, Del, C_7,
(SEQIDNO: 4979)
PLPKMNTTRMGIWI,;
CCDS2446.1, Ins, C_7,
(SEQIDNO: 4980)
PLRDPTEGKVLHWK,;
CCDS33033.1, Del, C_7,
(SEQIDNO: 4981)
QPLPVEGTGPGRGS,;
CCDS34961.1, Ins, C_7,
(SEQIDNO: 4982)
QPLWTATGLPRTRP,;
CCDS918.1, Del, C_7,
(SEQIDNO: 4983)
RMLGLALPWELFLI,;
CCDS13505.1, Ins, C_7,
(SEQIDNO: 4984)
RPPRAAREARPGRH,;
CCDS54831.1, Del, C_7,
(SEQIDNO: 4985)
RPSPPACAATCPTR,;
CCDS41266.1, Del, C_7,
(SEQIDNO: 4986)
RRAPPGWACGRGAF,;
CCDS12921.1, Del, C_7,
(SEQIDNO: 4987)
RTRSSWPPTGPLCP,;
CCDS9261.1, Del, C_7,
(SEQIDNO: 4988)
SRPPCSWNWRTRTR,;
CCDS42217.1, Del, C_7,
(SEQIDNO: 4989)
TCWLEVPSGGRLCL,;
CCDS32041.1, Del, C_7,
(SEQIDNO: 4990)
TLGAALPPWPVEGS,;
CCDS34455.1, Del, C_7,
(SEQIDNO: 4991)
TPPQPQSVLCATGG,;
CCDS10804.1, Del, C_7,
(SEQIDNO: 4992)
TTRCTSTATRAPSP,;
CCDS45403.1, Del, C_7,
(SEQIDNO: 4993)
AAWPAASRVWTMS,;
CCDS58503.1, Del, C_7,
(SEQIDNO: 4994)
CHPFIHPQVPHHPL,;
CCDS10324.1, Del, C_7,
(SEQIDNO: 4995)
CIQQARWRLSSPM,;
CCDS42144.1, Ins, C_7,
(SEQIDNO: 4996)
CPGRRPPATAHLL,;
CCDS8666.1, Del, C_7,
(SEQIDNO: 4997)
GCSHQLPCQTLGF,;
CCDS1195.1, Del, C_7,
(SEQIDNO: 4998)
GPEAARPQPHPHA,;
CCDS43537.1, Del, C_7,
(SEQIDNO: 4999)
HPCRASPAASGRQ,;
CCDS4026.1, Del, C_7,
(SEQIDNO: 5000)
ITFRYLLAVLILF,;
CCDS44306.1, Ins, C_7,
(SEQIDNO: 5001)
LCQCQDLPKGCPQ,;
CCDS45696.1, Del, C_7,
(SEQIDNO: 5002)
LETWSTLQPSGQW,;
CCDS870.1, Ins, C_7,
(SEQIDNO: 5003)
LRLDSRHLHRPGS,;
CCDS2615.1, Del, C_7,
(SEQIDNO: 5004),
LSSSPTSLCRGRC,;
CCDS55442.1, Del, C7,
(SEQIDNO: 5005)
MTRCASLHCPTTP,;
CCDS5910.1, Del, C_7,
(SEQIDNO: 5007)
PAGWPQAAPRPSA,;
CCDS42031.1, Ins, C_7,
(SEQIDNO: 5008)
PCSYPEQRPKPPS,;
CCDS918.1, Ins, C_7,
(SEQIDNO: 5010)
PGCSVWLCHGSSS,;
CCDS6950.1, Ins, C_7,
(SEQIDNO: 5011)
PGRRPPTRRAASV,;
CCDS41788.1, Ins, C_7,
(SEQIDNO: 5012)
PKTQTESKASEYS,;
CCDS1053.1, Ins, C_7,
(SEQIDNO: 5013)
PRFGPYAALHPRV,;
CCDS44281.1, Ins, C_7,
(SEQIDNO: 5014)
QCGDTCADRGEIH,;
CCDS46579.1, Ins, C_7,
(SEQIDNO: 5015)
QGVGPYSPRPPDF,;
CCDS47358.1, Ins, C_7,
(SEQIDNO: 5016)
QHPSYTSRGLPGL,;
CCDS33407.1, Ins, C_7,
(SEQIDNO: 5017)
RAGPVLAGLCPLL,;
CCDS6954.1, Del, C_7,
(SEQIDNO: 5018)
RCPSTGRRTTSSS,;
CCDS9925.1, Ins, C_7,
(SEQIDNO: 5019)
RGQVQQTLCLLND,;
CCDS9060.1, Ins, C_7,
(SEQIDNO: 5020)
RGRSQDCDQVCDQ,;
CCDS59018.1, Del, C_7,
(SEQIDNO: 5021)
RKTRAAPRTPLPV,;
CCDS2369.1, Del, C_7,
(SEQIDNO: 5022)
RMKDPRVLVPPIS,;
CCDS6982.1, Ins, C_7,
(SEQIDNO: 5023)
RRAWPRGSRWSPW,;
CCDS48064.1, Del, C_7,
(SEQIDNO: 5024)
SAAATAAAAVSSP,;
CCDS14680.1, Del, C_7,
(SEQIDNO: 5025)
SIESISFFSMETS,;
CCDS44477.1, Del, C_7,
(SEQIDNO: 5026)
SKLTSKTKLAKKC,;
CCDS54003.1, Del, C_7,
(SEQIDNO: 5027)
SLCAESARRPSPQ,;
CCDS11629.1, Ins, C_7,
(SEQIDNO: 5028)
SLRPANAEPLLLQ,;
CCDS1172.2, Del, C_7,
(SEQIDNO: 5029)
SLSPGPKRTQIWS,;
CCDS12929.1, Del, C_7,
(SEQIDNO: 5030)
SQGRSPHWCRCRG,;
CCDS9510.1, Del, C_7,
(SEQIDNO: 5031)
SQKLPAWPARRRA,;
CCDS58446.1, Ins, C_7,
(SEQIDNO: 5032)
SQWGPPPSAAAAG,;
CCDS11524.1, Ins, C_7,
(SEQIDNO: 5033)
SQWRLNQRGHRSD,;
CCDS8384.1, Ins, C_7,
(SEQIDNO: 5034)
SRHSPPSPRPHPC,;
CCDS48189.1, Del, C_7,
(SEQIDNO: 5035)
STTRATLSSSARS,;
CCDS34637.1, Del, C_7,
(SEQIDNO: 5036)
TMGPSGRSRTWFA,;
CCDS6412.1, Ins, C_7,
(SEQIDNO: 5037)
TPGRWRPGADGQS,;
CCDS44216.1, Del, C_7,
(SEQIDNO: 5038)
WVPHTETPSAGVV,;
CCDS12378.1, Del, C_7,
(SEQIDNO: 5039)
APSRPPTTPTPP,;
CCDS47534.1, Del, C_7,
(SEQIDNO: 5040)
AREGRAATVAES,;
CCDS53984.1, Del, C_7,
(SEQIDNO: 5041)
EPALSALKAPRR,;
CCDS725.1, Del, C_7,
(SEQIDNO: 5042)
GCMGSEIWKSCT,;
CCDS8861.1, Ins, C_7,
(SEQIDNO: 5043)
HGTAAPCLPSAV,;
CCDS45544.1, Ins, C_7,
(SEQIDNO: 5044)
HTSAPAPRAWSG,;
CCDS13347.1, Del, C_7,
(SEQIDNO: 5045)
ISVRWMASASVT,;
CCDS7929.1, Del, C_7,
(SEQIDNO: 5046)
KSCPSSARNNWA,;
CCDS34063.1, Ins, C_7,
(SEQIDNO: 5047)
LFPGARPDGGNL,;
CCDS8517.1, Del, C_7,
(SEQIDNO: 5048)
LNHRKGSSVQNP,;
CCDS32732.1, Del, C_7,
(SEQIDNO: 5049)
PAPATQAPCMMT,;
CCDS12366.1, Ins, C_7,
(SEQIDNO: 5050)
PAPIFLLWGPLG,;
CCDS56581.1, Ins, C_7,
(SEQIDNO: 5051)
PATASCAAQWPD,;
CCDS34779.1, Del, C_7,
(SEQIDNO: 5052)
PLLVLTPPGGLL,;
CCDS8403.1, Del, C_7,
(SEQIDNO: 5053)
PPSSHPRPLPAG,;
CCDS4206.1, Ins, C_7,
(SEQIDNO: 5054)
PRTPLRLPSGVL,;
CCDS30855.1, Del, C_7,
(SEQIDNO: 5056)
PVLAPIMSRGRA,;
CCDS2800.1, Ins, C_7,
(SEQIDNO: 5057)
PYTCSLHCHGRA,;
CCDS11816.1, Ins, C_7,
(SEQIDNO: 5058)
QKLHQKQLQNFL,;
CCDS53578.1, Del, C_7,
(SEQIDNO: 5059)
QTSLSALKSSGT,;
CCDS13938.1, Del, C_7,
(SEQIDNO: 5060)
RAVCPRESLRRP,;
CCDS747.1, Del, C_7,
(SEQIDNO: 5061)
REHSAARKFYKT,;
CCDS31596.1, Ins, C_7,
(SEQIDNO: 5062)
RGRRRGPGRGGR,;
CCDS58101.1, Ins, C_7,
(SEQIDNO: 5063)
RRPEPAPSWLRA,;
CCDS7331.1, Ins, C_7,
(SEQIDNO: 5064)
SNGSQDPAPYDS,;
CCDS32883.1, Del, C_7,
(SEQIDNO: 5065)
SPRCPFHMSSCR,;
CCDS42144.1, Del, C_7,
(SEQIDNO: 5066)
SRETPPSHSPPA,;
CCDS31013.1, Ins, C_7,
(SEQIDNO: 5067)
SSRHASVQHLPL,;
CCDS9989.2, Ins, C_7,
(SEQIDNO: 5068)
STSSTTTPARLL,;
CCDS12601.1, Ins, C_7,
(SEQIDNO: 5069)
TPRSLHSCHRQV,;
CCDS53685.1, Del, C_7,
(SEQIDNO: 5070)
TSLPLLTTATST,;
CCDS7512.1, Del, C_7,
(SEQIDNO: 5071)
VPLLEHTPTSPD,;
CCDS6950.1, Del, C_7,
(SEQIDNO: 5072)
WPASSHAPRSLG,;
CCDS55444.1, Ins, C_7,
(SEQIDNO: 5073)
WPFSILGSPGPA,;
CCDS45997.1, Ins, C_7,
(SEQIDNO: 5074)
WTWGCRWARHRL,;
CCDS44581.1, Ins, C_7,
(SEQIDNO: 5075)
ASAATATAPRG,;
CCDS42843.1, Ins, C_7,
(SEQIDNO: 5076)
CGGLSPCDWQL,;
CCDS6916.1, Ins, C_7,
(SEQIDNO: 5077)
CQWDPQSSGAL,;
CCDS5873.2, Del, C_7,
(SEQIDNO: 5078)
GCTATGRASGW,;
CCDS42824.1, Del, C_7,
(SEQIDNO: 5079)
GVWTWPSTRTP,;
CCDS11816.1, Del, C_7,
(SEQIDNO: 5081)
KTAPETAAKFL,;
CCDS46134.1, Del, C_7,
(SEQIDNO: 5082)
LCLASLSSKTS,;
CCDS42868.2, Del, C_7,
(SEQIDNO: 5083)
LRGHAQMCRVN,;
CCDS4956.1, Ins, C_7,
(SEQIDNO: 5084)
LSQLVICFGAE,;
CCDS9278.1, Ins, C_7,
(SEQIDNO: 5085)
LVPRGASSGLS,;
CCDS55892.1, Del, C_7,
(SEQIDNO: 5086)
MRRPPPSAPMT,;
CCDS33928.1, Ins, C_7,
(SEQIDNO: 5087)
PASRRGEKTNL,;
CCDS33075.1, Del, C_7,
(SEQIDNO: 5088)
PCWSRCSLRQM,;
CCDS11120.1, Ins, C_7,
(SEQIDNO: 5089)
PEPSKHLLQGM,;
CCDS14033.1, Ins, C_7,
(SEQIDNO: 5090)
PGEQLWQSVWE,;
CCDS6811.1, Ins, C_7,
(SEQIDNO: 5091)
PGISHRLPAGL,;
CCDS31723.1, Ins, C_7,
(SEQIDNO: 5092)
PGQRFCHALCD,;
CCDS10743.1, Ins, C_7,
(SEQIDNO: 5093)
PHLQSHSISLP,;
CCDS8896.1, Ins, C_7,
(SEQIDNO: 5094)
PLHQFLWLLEL,;
CCDS617.2, Del, C_7,
(SEQIDNO: 5095)
PLQPYLLPCLL,;
CCDS53277.1, Ins, C_7,
(SEQIDNO: 5096)
PPGPRCVQEGA,;
CCDS12431.1, Del, C_7,
(SEQIDNO: 5097)
PQPPGCCPWPA,;
CCDS56602.1, Ins, C_7,
(SEQIDNO: 5098)
PQRDPSAGEGK,;
CCDS12601.1, Del, C_7,
(SEQIDNO: 5099)
PQVPPQLPQAG,;
CCDS42179.1, Ins, C_7,
(SEQIDNO: 5100)
RGGQRWLLHVL,;
CCDS12896.1, Del, C_7,
(SEQIDNO: 5101)
RPAAAPTRTSS,;
CCDS9409.1, Ins, C_7,
(SEQIDNO: 5102)
RRRRGGLQGPR,;
CCDS1547.1, Del, C_7,
(SEQIDNO: 5103)
SCPQAIPRSPC,;
CCDS13442.1, Del, C_7,
(SEQIDNO: 5104)
SPRGVRARRAQ,;
CCDS10693.1, Del, C_7,
(SEQIDNO: 5105)
SSASAQMPLTP,;
CCDS14053.1, Del, C_7,
(SEQIDNO: 5106)
SSEGSATSMGL,;
CCDS32742.1, Del, C_7,
(SEQIDNO: 5107)
TSATSPNAVAA,;
CCDS5794.1, Del, C_7,
(SEQIDNO: 5108)
TSSLTMESSGH,;
CCDS55791.1, Ins, C_7,
(SEQIDNO: 5109)
VFCLFLVKHFC,;
CCDS2407.1, Del, C_7,
(SEQIDNO: 5110)
VWPRHPCLLWA,;
CCDS8756.2, Del, C_7,
(SEQIDNO: 5111)
WGILSTWLLSG,;
CCDS45778.2, Del, C_7,
(SEQIDNO: 5112)
AQWAPAASPA,;
CCDS41837.1, Ins, C_7,
(SEQIDNO: 5113)
CQSAECQPHC,;
CCDS8023.2, Del, C_7,
(SEQIDNO: 5114)
DCHPRAPLPW,;
CCDS55462.1, Ins, C_7,
(SEQIDNO: 5117)
GLRDRLGAGV,;
CCDS12700.1, Del, C_7,
(SEQIDNO: 5118)
GPVMAWTSRM,;
CCDS54474.1, Ins, C_7,
(SEQIDNO: 5119)
HEAGNGCQAL,;
CCDS8452.1, Ins, C_7,
(SEQIDNO: 5120)
HSGGGHTETD,;
CCDS13911.1, Del, C_7,
(SEQIDNO: 5121)
IKASSMPQTP,;
CCDS8548.1, Ins, C_7,
(SEQIDNO: 5123)
LPAASGTQVV,;
CCDS8521.2, Ins, C_7,
(SEQIDNO: 5124)
LPAPPARRPC,;
CCDS32732.1, Ins, C_7,
(SEQIDNO: 5125)
LQPQPRRLPA,;
CCDS11253.1, Del, C_7,
(SEQIDNO: 5126)
NIHLSSRNQK,;
CCDS346.2, Ins, C_7,
(SEQIDNO: 5127)
PARRQGLRGS,;
CCDS13734.1, Ins, C_7,
(SEQIDNO: 5128)
PASCYIRGAE,;
CCDS516.1, Ins, C_7,
(SEQIDNO: 5129)
PAWCLHPSSP,;
CCDS54603.1, Del, C_7,
(SEQIDNO: 5131)
PGALLNPSRG,;
CCDS6419.1, Del, C_7,
(SEQIDNO: 5132)
PPPPLKSASA,;
CCDS9189.1, Del, C_7,
(SEQIDNO: 5134)
PSLGSPGKCV,;
CCDS4112.1, Ins, C_7,
(SEQIDNO: 5135)
PTASRDAGPV,;
CCDS7607.1, Del, C_7,
(SEQIDNO: 5136)
PWRSCPAPAT,;
CCDS12581.1, Ins, C_7,
(SEQIDNO: 5137)
QAAAAVFISG,;
CCDS13948.1, Ins, C_7,
(SEQIDNO: 5138)
QCRLHPPPAA,;
CCDS3080.1, Ins, C_7,
(SEQIDNO: 5139)
QDGCQDVPGL,;
CCDS4668.1, Ins, C_7,
(SEQIDNO: 5140)
QDTRDPPPCL,;
CCDS34373.1, Ins, C_7,
(SEQIDNO: 5141)
QDTYDPPPHL,;
CCDS14091.2, Ins, C_7,
(SEQIDNO: 5142)
QLGAPGPAAP,;
CCDS10206.1, Del, C_7,
(SEQIDNO: 5143)
QSPTGRSWSI,;
CCDS11120.1, Del, C_7,
(SEQIDNO: 5144)
RALQTSTTRY,;
CCDS53981.1, Del, C_7,
(SEQIDNO: 5145)
RLRSRPTTGT,;
CCDS9925.1, Del, C_7,
(SEQIDNO: 5146)
RSSSTNPLSS,;
CCDS12227.1, Ins, C_7,
(SEQIDNO: 5147)
RTQCGHHHCQ,;
CCDS1075.1, Del, C_7,
(SEQIDNO: 5149)
RVLATHPQAT,;
CCDS10457.1, Del, C_7,
(SEQIDNO: 5150)
RYAGTRCCCH,;
CCDS53838.1, Del, C_7,
(SEQIDNO: 5151)
SHPHPHLPHL,;
CCDS8403.1, Del, C_7,
(SEQIDNO: 5152)
SSHPRPLPAG,;
CCDS11157.1, Del, C_7,
(SEQIDNO: 5153)
SSTGSKTWPC,;
CCDS47684.1, Del, C_7,
(SEQIDNO: 5154)
TIKITSTFIS,;
CCDS34129.1, Del, C_7,
(SEQIDNO: 5155)
TPRTGGPRCW,;
CCDS2670.2, Del, C_7,
(SEQIDNO: 5156)
TSSPSSRASW,;
CCDS56415.1, Ins, C_7,
(SEQIDNO: 5157)
WYSGAWGLCS,;
CCDS54466.1, Del, C_7,
(SEQIDNO: 5158)
CPSCMPSGT,;
CCDS45997.1, Del, C_7,
(SEQIDNO: 5160)
DLGLPLGQA,;
CCDS7801.1, Ins, C_7,
(SEQIDNO: 5161)
EWKCSPLSL,;
CCDS32872.1, Ins, C_7,
(SEQIDNO: 5162)
GLRRRERHI,;
CCDS12684.1, Del, C_7,
(SEQIDNO: 5163)
GTNPRLMEL,;
CCDS31007.1, Del, C_7,
(SEQIDNO: 5164)
HVKRHAVNL,;
CCDS1943.1, Del, C_7,
(SEQIDNO: 5166)
IRRVSPGQG,;
CCDS13305.1, Del, C_7,
(SEQIDNO: 5167)
ITGGTGLLL,;
CCDS31683.1, Del, C_7,
(SEQIDNO: 5168)
KVRWPWVPH,;
CCDS31882.1, Del, C_7,
(SEQIDNO: 5169)
LEHLNHSHL,;
CCDS46221.1, Ins, C_7,
(SEQIDNO: 5170)
LLLCHDPPQ,;
CCDS54370.1, Del, C_7,
(SEQIDNO: 5171)
NATSACQDP,;
CCDS12780.1, Del, C_7,
(SEQIDNO: 5173)
NRGAQPLNN,;
CCDS4112.1, Del, C_7,
(SEQIDNO: 5174)
NSLQRRGPS,;
CCDS8097.1, Ins, C_7,
(SEQIDNO: 5175)
PACHFSQLH,;
CCDS12190.1, Del, C_7,
(SEQIDNO: 5176)
PPRRPSTAN,;
CCDS55403.1, Ins, C_7,
(SEQIDNO: 5177)
PPTESDFIA,;
CCDS47534.1, Ins, C_7,
(SEQIDNO: 5178)
PQEREERPQ,;
CCDS55220.1, Del, C_7,
(SEQIDNO: 5179)
PSHQATRLW,;
CCDS5187.1, Ins, C_7,
(SEQIDNO: 5180)
QAALPGPRL,;
CCDS54914.1, Ins, C_7,
(SEQIDNO: 5181)
QDGPHGLQP,;
CCDS3541.1, Ins, C_7,
(SEQIDNO: 5182)
QIPKSSPAT,;
CCDS41295.1, Del, C_7,
(SEQIDNO: 5183)
QMPSPKARR,;
CCDS7331.1, Del, C_7,
(SEQIDNO: 5184)
QWLPRPRPL,;
CCDS59376.1, Ins, C_7,
(SEQIDNO: 5185)
QWPCGAGHE,;
CCDS13938.1, Ins, C_7,
(SEQIDNO: 5186)
REPCVPGKV,;
CCDS11316.1, Ins, C_7,
(SEQIDNO: 5187)
RNERGGRVV,;
CCDS8002.1, Del, C_7,
(SEQIDNO: 5188)
RRIAVLVFQ,;
CCDS31723.1, Del, C_7,
(SEQIDNO: 5189)
RSEVLSCPL,;
CCDS59482.1, Ins, C_7,
(SEQIDNO: 5190)
RSGPARLPV,;
CCDS7628.1, Ins, C_7,
(SEQIDNO: 5191)
SEGDATGAR,;
CCDS45001.1, Del, C_7,
(SEQIDNO: 5192)
SSRCWAGAW,;
CCDS1912.1, Del, C_7,
(SEQIDNO: 5193)
STCSLPCRG,;
CCDS2632.1, Del, C_7,
(SEQIDNO: 5194)
TIIKGKRRT,;
CCDS7739.1, Del, C_7,
(SEQIDNO: 5195)
TPRLQDLGH,;
CCDS10693.1, Ins, C_7,
(SEQIDNO: 5196)
TQAHLPKCP,;
CCDS4956.1, Del, C_7,
(SEQIDNO: 5198)
VATGHLLRS,;
CCDS992.1, Del, C_7,
(SEQIDNO: 5199)
VQPNGLGGN,;
CCDS8896.1, Del, C_7,
(SEQIDNO: 5200)
APPISLAS,;
CCDS59420.1, Ins, C_7,
(SEQIDNO: 5201)
CGKPLHLH,;
CCDS5863.1, Ins, C_7,
(SEQIDNO: 5202)
CLITWLTN,;
CCDS8221.1, Del, C_7,
(SEQIDNO: 5203)
EALTGQGM,;
CCDS42139.1, Ins, C_7,
(SEQIDNO: 5204)
EARGNGPG,;
CCDS42292.1, Del, C_7,
(SEQIDNO: 5205)
FADKPRPN,;
CCDS11841.1, Del, C_7,
(SEQIDNO: 5206)
FYLSRVYP,;
CCDS34437.1, Ins, C_7,
(SEQIDNO: 5207)
GAPYSETH,;
CCDS13734.1, Del, C_7,
(SEQIDNO: 5208)
GFLLHQRR,;
CCDS1687.1, Ins, C_7,
(SEQIDNO: 5209)
GGGHLEEV,;
CCDS7771.1, Del, C_7,
(SEQIDNO: 5210)
GGPRPCWT,;
CCDS13418.1, Del, C_7,
(SEQIDNO: 5211)
GLLRNTQQ,;
CCDS1753.1, Ins, C_7,
(SEQIDNO: 5212)
FIHPWEPDL,;
CCDS1151.1, Del, C_7,
(SEQIDNO: 5213)
HLRHPLLL,;
CCDS46055.1, Ins, C_7,
(SEQIDNO: 5214)
KDPCPETG,;
CCDS10013.1, Del, C_7,
(SEQIDNO: 5215)
LHPPFPCL,;
CCDS858.1, Del, C_7,
(SEQIDNO: 5216)
MEAGAGQW,;
CCDS45820.1, Del, C_7,
(SEQIDNO: 5217)
MEKDFQRW,;
CCDS4913.1, Del, C_7,
(SEQIDNO: 5218)
PAACSPAK,;
CCDS34327.1, Ins, C_7,
(SEQIDNO: 5219)
PCDRHLSK,;
CCDS46732.1, Ins, C_7,
(SEQIDNO: 5220)
PDPALQPG,;
CCDS14081.1, Ins, C_7,
(SEQIDNO: 5221)
PDRRPSAH,;
CCDS12173.1, Ins, C_7,
(SEQIDNO: 5222)
PDTLLRTA,;
CCDS9756.1, Ins, C_7,
(SEQIDNO: 5223)
PDTMSGYF,;
CCDS1138.1, Ins, C_7,
(SEQIDNO: 5224)
PGHPPRPH,;
CCDS41687.1, Ins, C_7,
(SEQIDNO: 5225)
PPAGEPAH,;
CCDS32872.1, Del, C_7,
(SEQIDNO: 5226)
PPTARATH,;
CCDS33428.1, Del, C_7,
(SEQIDNO: 5227)
PSPQPCSW,;
CCDS1263.1, Ins, C_7,
(SEQIDNO: 5228)
QGRPGPEW,;
CCDS32760.1, Ins, C_7,
(SEQIDNO: 5229)
QQPLRLRP,;
CCDS7728.1, Ins, C_7,
(SEQIDNO: 5231)
RDGQQSEV,;
CCDS10554.1, Del, C_7,
(SEQIDNO: 5232)
RISGNIRL,;
CCDS33469.1, Del, C_7,
(SEQIDNO: 5233)
RPASQQVS,;
CCDS42972.1, Ins, C_7,
(SEQIDNO: 5234)
RTTRAVSV,;
CCDS46119.1, Ins, C_7,
(SEQIDNO: 5235)
SGAHRGEA,;
CCDS14003.1, Ins, C_7,
(SEQIDNO: 5237)
STQPLHYQ,;
CCDS33378.1, Ins, C_7,
(SEQIDNO: 5238)
TGDPKLPW,;
CCDS10976.1, Del, C_7,
(SEQIDNO: 5239)
TGPPSTSS,;
CCDS276.1, Ins, C_7,
(SEQIDNO: 5240)
TPRGRLLQ,;
CCDS44492.1, Ins, C_7,
(SEQIDNO: 5241)
TPRRGASV,;
CCDS56182.1, Ins, C_7,
(SEQIDNO: 5242)
TQAPATRY,;
CCDS7801.1, Del, C_7,
(SEQIDNO: 5243)
VEVLPTFF,;
CCDS44753.1, Ins, C_7,
(SEQIDNO: 5244)
WIFEATSP,;
CCDS43896.1, Del, C_8,
(SEQIDNO: 5245)
CRPRVTPGPPPCRPRVTPGPPPCRPRVTPGPPPCRPRVTPGPPPCRPRVT
PGPPPCRPRVTPAPPPCRPRVTPGPPPCRPRVTPAPPPCRPRVTPGPP
P,;
CCDS54609.1, Del, C_8,
(SEQIDNO: 5248)
QSSPFLARSWNTMQWNNKKMAMTVIAGAHHCQYKLTYTKVWKMNWKKMMI
GSQHLLFEAWLLLLLSPLDSSPLQLLLHPHGKRCNPCCRLTWMS,;
CCDS43896.1, Del, C_8,
(SEQIDNO: 5249)
CRPRVTPGPPPCRPRVTPGPPPCRPRVTPGPPPCRPRVTPGPPPCRPRVT
PAPPPCRPRVTPGPPPCRPRVTPAPPPCRPRVTPGPPP,;
CCDS10689.2, Del, C_8,
(SEQIDNO: 5250)
FIHLVPLFIWTPWRKSGSGSGLNAWNGFSNLVRLMGPWHLCMGLKSWISV
PCPNLLPAPSALVLLAPATPPFGLIPRLPTGLYCFPSSD,;
CCDS46136.1, Ins, C_8,
(SEQIDNO: 5251)
RGGHGPVNASSAPDTSPPRHPRRWVSQQRQRLWRQFRVGGGFPPPPPSRP
PAVLLPLLRLACAGDPGATRPGPRRPARRPRGEL,;
CCDS46136.1, Del, C_8,
(SEQIDNO: 5253)
RGTRTRQRLQRPRHLPTPPPPEMGFPATTAALEAVSSGRRISPSSPLQAP
RCASPASPSRLRWRPRGHPPGPPTPGPQAPWRI,;
CCDS33928.1, Del, C_8,
(SEQIDNO: 5254)
RPPMTTWPRMRMTLRSAPSTAPSWARGSLPGPARARPTTPLCLSRRGRPL
PWRTTCSSRPRVGASRPAPHRPQRSSRRYSRSA,;
CCDS47878.2, Ins, C_8,
(SEQIDNO: 5255)
PTSSTFCSSTGPTAGFSGPAALSFHYDATCATPCASSPACPAAATDGRTL
CRPHPTLPAAARIRSQLLKTFSVQTPTDKNYR,;
CCDS55835.1, Ins, C_8,
(SEQIDNO: 5256)
PWTPWPLTVPQPTNSSLNDARGSARQRAPRRGGPKPCHCGSCSGQPPAQC
QPTARPRHPPASRPHSPEPRHGHPCATSTV,;
CCDS43896.1, Del, C_8,
(SEQIDNO: 5257)
CRPRVTPGPPPCRPRVTPGPPPCRPRVTPGPPPCRPRVTPAPPPCRPRVT
PGPPPCRPRVTPAPPPCRPRVTPGPPP,;
CCDS7529.1, Ins, C_8,
(SEQIDNO: 5258)
PTNGAPSVWYSWCLCRASHLQCALGTPSCPSLTLQFHMYLWALGMGPRAS
TCSILVYCSPTSFASSLHWESCSPT,;
CCDS41693.1, Ins, C_8,
(SEQIDNO: 5259)
HQPVHRRPGLQGSWWAEQSGGKDREGGRREGGENGEGRSGGGGGKHQRGR
REGERGGGGRGRREGGEGDRKGG,;
CCDS44622.1, Ins, C_8,
(SEQIDNO: 5260)
QHPQCPDAEWNDQTGAWDRDSPASAPHSSPIATLASPGSALPGPWFLASQ
HCPCPDTALAPARCPLPRPPAGQ,;
CCDS45775.1, Del, C_8,
(SEQIDNO: 5261)
RRGTSQRAQSGPLSFVLHFLAKDPHPMFLCTPRAHPLARPQGHLLAHPGP
SPTWPGPLPLPQTRLDLSAGPTA,;
CCDS43374.1, Ins, C_8,
(SEQIDNO: 5262)
PTSSLAWRSRNATSSSPSSWWSWNPSTSSISRRPWHSSTSTRNGYASTSP
IWIWSSCSPSSAIWINPQKAL,;
CCDS33051.1, Ins, C_8,
(SEQIDNO: 5263)
PTPRFAPFGGPSCSARSRGRTTPCTPSPGSTGPWWWGSWGPRPGRSYCWS
QTQESQQAGGGLRGAHSPQS,;
CCDS11528.1, Ins, C_8,
(SEQIDNO: 5264)
PTPISGRHAPGGRLPALSLLAAVPGQRCPTCQEQGAQRQLHEAGSGPRAP
VGPAWLTPAQCRTYQCH,;
CCDS43896.1, Del, C_8,
(SEQIDNO: 5265)
CRPRVTPGPPPCRPRVTPGPPPCRPRVTPAPPPCRPRVTPGPPPCRPRVT
PAPPPCRPRVTPGPPP,;
CCDS470.1, Ins, C_8,
(SEQIDNO: 5267)
RRPRPQRRRHQARHYGQRRRERWPGRPHIGGACRRGQEGHRNEGFGNSKM
VQCKERIWFHQQE,;
CCDS46143.1, Del, C_8,
(SEQIDNO: 5268)
HPVRPPPPNVRAWVGQQPPMPLGRPLGLEGQGARLIPPVSLKGFWDPRPT
GKGLEGGRHRT,;
CCDS56415.1, Del, C_8,
(SEQIDNO: 5269)
QLPMQRHLPLVLGRPHPWLRLLPMSSPQLRGLPRQVQLPRQPPATRGSSG
FPTRVWNPWS,;
CCDS12027.1, Del, C_8,
(SEQIDNO: 5271)
PAPRRILLRYQARASTTARTQTPTASACLPSPCWGGPGPRDPWRRPPALA
PTAQSRSP,;
CCDS8908.1, Ins, C_8,
(SEQIDNO: 5272)
PWTPWPLTVPQPTNSSLNDARGSARQRAPRRGGPRHPPASRPHSPEPRHG
HPCATSTV,;
CCDS33016.1, Del, C_8,
(SEQIDNO: 5273)
HLTTKGEGWVHQWGVTVGAQVATAPSMGTPHPLPHEIPSMALTPTALCSW
SMAWINLR,;
CCDS30551.1, Ins, C_8,
(SEQIDNO: 5274)
RRPPPGSQQYRTQPDHPSALITTSDHCQRPQDHRVARADGAPHGTLPCTQ
PGGVRLW,;
CCDS46158.1, Del, C_8,
(SEQIDNO: 5275)
LRPGPGSGFSPPPPWPAWPSSAEGCSPRAWSSTLLPTTTQCVKVTTPPSA
ASSTST,;
CCDS33016.1, Ins, C_8,
(SEQIDNO: 5276)
PTSLRREKDGSTSGGSPSGPKSLRPPVWAPPTPSPTTRVWPSRRQPCAHG
LWLGSI,;
CCDS53986.1, Ins, C_8,
(SEQIDNO: 5277)
PVPPLQCLLSCLGPSPDDASSTTFPATSAAAATADSIPKGPPAGPRVHQA
LKSSTH,;
CCDS43896.1, Del, C_8,
(SEQIDNO: 5278)
CRPRVTPGPPPCRPRVTPAPPPCRPRVTPGPPPCRPRVTPAPPPCRPRVT
PGPPP,;
CCDS12921.1, Ins, C_8,
(SEQIDNO: 5279)
PEACGFSHAEPSREAATRAEVHGSPEFIHRCRGWWLPCTHPTGLGDGPAQ
PEIP,;
CCDS6980.1, Ins, C_8,
(SEQIDNO: 5280)
PGGLQPQQARPQDQPAAVHAECGGEDALETPVRLALLPARGRNQIEPAGL
S,;
CCDS9209.1, Del, C_8,
(SEQIDNO: 5281)
QGQARDLRCPLTAPLACLHLPSPPVRSTVCAMDSLRPVRLQKYPQAAAV
P,;
CCDS3368.1, Del, C_8,
(SEQIDNO: 5282)
GRSLPAGPSALPSPPSPSRRRAPPRSGRGSLRKWRPGASRRWRMSTWP
S,;
CCDS42139.1, Del, C_8,
(SEQIDNO: 5283)
GAPRSPSSVAGSSSATWQSGAMWVQPPWEQLPGGSCTLRMGLMSTTAS,;
CCDS5254.1, Ins, C_8,
(SEQIDNO: 5284)
PSNRFNGEKVGFRCVHLLRHPWTVFNFADGKTSTRSTSATSQGSDWNK,;
CCDS12057.2, Del, C_8,
(SEQIDNO: 5285)
LGGPGSALQAPWTRARLPPAARPLPEADSLGPPLQHGPEEGSRERLG,;
CCDS12310.1, Del, C_8,
(SEQIDNO: 5286)
LPQPCGPASCSTPSWPMAVPLAASRASPTSRSCMARSPRPSACQLPR,;
CCDS470.1, Del, C_8,
(SEQIDNO: 5287)
PPPPSAPPTPSPALRAAAQGAVARAASHRRRLPAGTRRSSQRRFWEQ,;
CCDS1157.1, Del, C_8,
(SEQIDNO: 5289)
RKLPQMPPSSMTKHLSGCRARGTEGEKKSTLWRSKVMTSSVGPSNG,;
CCDS2232.1, Del, C_8,
(SEQIDNO: 5290)
HAGACTEEIAILMRLTSPNASVLAATPENIVKWRFQKASLQEQPQ,;
CCDS43896.1, Del, C_8,
(SEQIDNO: 5291)
CRPRVTPAPPPCRPRVTPGPPPCRPRVTPAPPPCRPRVTPGPPP,;
CCDS3368.1, Ins, C_8,
(SEQIDNO: 5292)
RAEVSQRALLHSPVPRLPRAGGHRPDLEEAVSGSGGRGHPDGGG,;
CCDS14732.1, Del, C_8,
(SEQIDNO: 5293)
QSAMSIMTRRSLWRAARRRQTAWMSWSMRRWSCIKAATGTSWA,;
CCDS588.2, Ins, C_8,
(SEQIDNO: 5294)
HEWSSPAPSPLATPLPTLGTPKTGRYGSRLFPLLQSLLPQLL,;
CCDS45847.1, Del, C_8,
(SEQIDNO: 5295)
FIHLRYLHLSLMQKSHLIKNNLQLPWKPLRDLVGHSPRAYVAI,;
CCDS10834.1, Del, C_8,
(SEQIDNO: 5296)
LPHFHLPHPSKAPSHHLHLYLWLPLFPIQCLTAQPSPLRGRQ,;
CCDS46158.1, Ins, C_8,
(SEQIDNO: 5297)
PCARGPAPASRRRRPGRLGRHQPRAALPEPGVQLSCRQLHSV,;
CCDS8403.1, Ins, C_8,
(SEQIDNO: 5298)
PTTTAGLRARDQQQPAQPDAPELSRCPEPYGHEPARPAAPVP,;
CCDS11673.1, Ins, C_8,
(SEQIDNO: 5299)
QHQRPGPGGARRRGRQDGGRGRRRPPGPDHRGPEGRQQSGVR,;
CCDS33508.1, Ins, C_8,
(SEQIDNO: 5300)
PWGEAAGGSLHLVLRPLQQVGGCPGRTAPEKDGAEAPPCVQ,;
CCDS1701.1, Del, C_8,
(SEQIDNO: 5301)
ARSASCCAQWQARCRARWHCGGWASAGRAEGALRQRSARC,;
CCDS9955.1, Del, C_8,
(SEQIDNO: 5302)
HPQSHLHPLGLPHLPHPHCQPEEPRGPATTRAPCQDWPLP,;
CCDS11528.1, Del, C_8,
(SEQIDNO: 5303)
NPHFRPPRTWRATTSAQLARCSPWATLPHMPRARSSTAAA,;
CCDS14359.1, Ins, C_8,
(SEQIDNO: 5304)
PTGAHPPSTITPTACRPPSGQGPGSQGRGQPQFCSSILTD,;
CCDS32502.1, Del, C_8,
(SEQIDNO: 5305)
RRPATPPRPSRRGPEAEAEAAPASPLRARPAPRPTAPST,;
CCDS35096.1, Del, C_8,
(SEQIDNO: 5306)
HNPRHQTSVLSFTTANTVPTAIGQLWECLSTTRKDTQK,;
CCDS42139.1, Ins, C_8,
(SEQIDNO: 5308)
PEPQGAPHQWLALLPLHGNRGLCGCSHRGSSCLVVPVR,;
CCDS8038.2, Ins, C_8,
(SEQIDNO: 5309)
PSDPRPSPSRHHVLPGSDPGVSVCLQVAADPSEWNPDK,;
CCDS32579.1, Del, C_8,
(SEQIDNO: 5310)
TCSPQSLLSSWRSTQPHVPPSTLWGVRMTSLSASTSLW,;
CCDS30551.1, Del, C_8,
(SEQIDNO: 5311)
APSPWLPAVPHTARPPLRPHHDLGPLPASPGPPCGPC,;
CCDS58532.1, Del, C_8,
(SEQIDNO: 5312)
HPAARSSSCCPASPHSPGASPMSLSWGTALMTSPR,;
CCDS1402.1, Ins, C_8,
(SEQIDNO: 5313)
PSASPGHDFQEGAGGVSRGLPLAEDLLGVLAVFG,;
CCDS43896.1, Del, C_8,
(SEQIDNO: 5314)
CRPRVTPGPPPCRPRVTPAPPPCRPRVTPGPPP,;
CCDS42144.1, Ins, C_8,
(SEQIDNO: 5315)
LPRAGPGLPGGGRPHELLPATSGSRPEPPAGRG,;
CCDS13888.1, Del, C_8,
(SEQIDNO: 5318)
VAEEAAASRWKQSQQSLSLQQWKRPMGLSRPE,;
CCDS33055.1, Ins, C_8,
(SEQIDNO: 5319)
PSPAPSARLPPTQAEKRFPYTEKARPMEISV,;
CCDS10834.1, Ins, C_8,
(SEQIDNO: 5320)
PSPTSTSPTHQRPLPTTSTSTSGCPSSPFSA,;
CCDS45604.1, Del, C_8,
(SEQIDNO: 5321)
QQVPGAAAPAAAALMKTGPSWMEAWNQMGPT,;
CCDS1731.1, Del, C_8,
(SEQIDNO: 5322)
AFSGRILHQPEMAAMRLMPKFLNSTNSWWT,;
CCDS53838.1, Del, C_8,
(SEQIDNO: 5323)
HHHHPHRSLASPCPHRCPHRRPHPLQPTLL,;
CCDS33055.1, Del, C_8,
(SEQIDNO: 5324)
QPRSLRTTPPHTSGEKVSLHGKGAADGNLR,;
CCDS9318.1, Ins, C_8,
(SEQIDNO: 5325)
PASPSGPRGVPGLCTDGSSRLRDAPSADN,;
CCDS56415.1, Ins, C_8,
(SEQIDNO: 5326)
PNSQCRGTSPWSWAGLIRGSVFYQCRVLS,;
CCDS53838.1, Ins, C_8,
(SEQIDNO: 5327)
PPPPPAAPAAARPFGREEEPPLEKLQVDD,;
CCDS33508.1, Del, C_8,
(SEQIDNO: 5328)
VGRSGWGVPASCTAAPPTSRWMSWQDCS,;
CCDS33074.1, Del, C_8,
(SEQIDNO: 5329)
PPPGWLPRLTRERAAAALRAVGTQISI,;
CCDS1756.1, Ins, C_8,
(SEQIDNO: 5330)
QRTPWGHGFAGAPFPISKPHGPPAGQL,;
CCDS9318.1, Del, C_8,
(SEQIDNO: 5331)
RLPLRPQRGPRPLHRWLQQTTGCSQRR,;
CCDS58489.1, Del, C_8,
(SEQIDNO: 5332)
SLFLPGSTPSLHFLCWSLRSSGGCRSA,;
CCDS32579.1, Ins, C_8,
(SEQIDNO: 5333)
PRALLRVCCHRGGPRSRTFHPPPCGV,;
CCDS53838.1, Del, C_8,
(SEQIDNO: 5334)
TTTTSSPRRSPALRARGGTTIGEVTS,;
CCDS47878.2, Del, C_8,
(SEQIDNO: 5335)
HLLHLLLLHRSNCRFLWTCRSFLPL,;
CCDS11137.1, Del, C_8,
(SEQIDNO: 5336)
LTTGHLLAPKICHLHPGAWVTLNSW,;
CCDS9209.1, Ins, C_8,
(SEQIDNO: 5337)
PRARPGTCAARSQLPWPASTCPLPQ,;
CCDS11936.1, Ins, C_8,
(SEQIDNO: 5338)
PSLLQIPDGFSQTNCRLSRCCAFLR,;
CCDS45465.1, Del, C_8,
(SEQIDNO: 5339)
RRTCLGPPNERKGRQGMSLPPQGKR,;
CCDS33940.1, Ins, C_8,
(SEQIDNO: 5340)
PRAREAEGEEAAAEGLAESHRGQI,;
CCDS41575.1, Ins, C_8,
(SEQIDNO: 5341)
PTRSQGVPVLHQEPAQRRPPPAAP,;
CCDS12035.1, Ins, C_8,
(SEQIDNO: 5342)
PGPRARAPPAPAPGRGVAPGGGG,;
CCDS33940.1, Del, C_8,
(SEQIDNO: 5343)
QSQGSRRGRGGGGGAGGESQRAN,;
CCDS6980.1, Del, C_8,
(SEQIDNO: 5344)
RRSPTPASPAARPTSCSTCRMWW,;
CCDS41693.1, Del, C_8,
(SEQIDNO: 5345)
PACTSKAWTPRKLVGRAVRRKG,;
CCDS4328.1, Del, C_8,
(SEQIDNO: 5346)
PQPGNQRSNRSLPGTTRMRHRV,;
CCDS54609.1, Ins, C_8,
(SEQIDNO: 5347)
PSPAPSWHGAGTLCSGTTRKWL,;
CCDS58532.1, Ins, C_8,
(SEQIDNO: 5348)
PTQPQGLPAAAQLPHTHPEQVP,;
CCDS10689.2, Ins, C_8,
(SEQIDNO: 5349)
PTTSFPFLSGLPGGKAEAAAV,;
CCDS8403.1, Del, C_8,
(SEQIDNO: 5350)
HHHRRAPGQGSATASPARCT,;
CCDS2702.1, Del, C_8,
(SEQIDNO: 5351)
LQDGSLDRNLGSPLMSEFRK,;
CCDS34708.1, Ins, C_8,
(SEQIDNO: 5352)
PGWHLPRQGQHAEPRPRPW,;
CCDS13202.1, Del, C_8,
(SEQIDNO: 5353)
TALGATIPSRPRSAAALRT,;
CCDS2359.1, Del, C_8,
(SEQIDNO: 5354)
HLLLSLHPSLPKLPQNPL,;
CCDS4328.1, Ins, C_8,
(SEQIDNO: 5355)
HPSLATRDQTGACLARPG,;
CCDS14239.1, Del, C_8,
(SEQIDNO: 5356)
HQMKCLTAVDCLQAFWDM,;
CCDS59406.1, Ins, C_8,
(SEQIDNO: 5357)
PCLLPGQVLGGPELGPKW,;
CCDS11107.1, Ins, C_8,
(SEQIDNO: 5358)
PCRGDGPVPCPRRPAPAQ,;
CCDS58489.1, Ins, C_8,
(SEQIDNO: 5359)
PVSSFQDRLPPCISSAGA,;
CCDS8908.1, Del, C_8,
(SEQIDNO: 5360)
LDPMAPHRSPTNKLLPQ,;
CCDS13202.1, Ins, C_8,
(SEQIDNO: 5361)
LQLWELRFHQDRGQRLP,;
CCDS45465.1, Ins, C_8,
(SEQIDNO: 5362)
PGGRAWAPQTKGKGGRE,;
CCDS1756.1, Del, C_8,
(SEQIDNO: 5363)
ADSVGTWLRWCPFPHI,;
CCDS11816.1, Ins, C_8,
(SEQIDNO: 5364)
PEPPQKLHQKQLQNFL,;
CCDS45539.1, Ins, C_8,
(SEQIDNO: 5365)
RGDHRSNQNREWCLEE,;
CCDS44440.1, Del, C_8,
(SEQIDNO: 5366)
TLMMSNGCWGWQQSWE,;
CCDS53986.1, Del, C_8,
(SEQIDNO: 5367)
CAPAPVPAQLPRALT,;
CCDS33637.1, Del, C_8,
(SEQIDNO: 5368)
GPQERARAARMMRAQ,;
CCDS1731.1, Ins, C_8,
(SEQIDNO: 5369)
LHSPEESSISPKWRP,;
CCDS2702.1, Ins, C_8,
(SEQIDNO: 5370)
PFKMEAWTETLEALL,;
CCDS11816.1, Del, C_8,
(SEQIDNO: 5371)
RAPPKTAPETAAKFL,;
CCDS1943.1, Ins, C_8,
(SEQIDNO: 5372)
PLYCGPRPPLDCFQ,;
CCDS45604.1, Ins, C_8,
(SEQIDNO: 5373)
PSKCQAPPLPPPPH,;
CCDS59317.1, Ins, C_8,
(SEQIDNO: 5374)
PSLLQIPDGFSQTN,;
CCDS42144.1, Del, C_8,
(SEQIDNO: 5375)
SPCWAWTPGGWAAS,;
CCDS1153.1, Del, C_8,
(SEQIDNO: 5376)
STGRLTARRMPPCL,;
CCDS46137.1, Del, C_8,
(SEQIDNO: 5377)
HTSWNFRPLNWRS,;
CCDS45775.1, Ins, C_8,
(SEQIDNO: 5378)
PGEEPPRGHRAAP,;
CCDS10967.1, Ins, C_8,
(SEQIDNO: 5379)
QEADAKRQRQWQW,;
CCDS2232.1, Ins, C_8,
(SEQIDNO: 5380)
PMQVHARRKLLF,;
CCDS58106.1, Ins, C_8,
(SEQIDNO: 5381)
PTSARTKLGCWA,;
CCDS43896.1, Del, C_8,
(SEQIDNO: 5382)
CRPRVTPGPPP,;
CCDS59406.1, Del, C_8,
(SEQIDNO: 5383)
MPSSWSSSGRT,;
CCDS1157.1, Ins, C_8,
(SEQIDNO: 5384)
PGNCPRCLLHR,;
CCDS33637.1, Ins, C_8,
(SEQIDNO: 5385)
RGRRRGPGLRG,;
CCDS10413.1, Del, C_8,
(SEQIDNO: 5386)
RTARGVTARSP,;
CCDS4827.1, Ins, C_8,
(SEQIDNO: 5387)
PAVSSPYSCV,;
CCDS35096.1, Ins, C_8,
(SEQIDNO: 5388)
PTTPATRPQY,;
CCDS45847.1, Ins, C_8,
(SEQIDNO: 5389)
PTTSATSTSP,;
CCDS32879.1, Ins, C_8,
(SEQIDNO: 5390)
PVPPLHPPLL,;
CCDS33074.1, Ins, C_8,
(SEQIDNO: 5391)
HPHRAGCHV,;
CCDS46134.1, Del, C_8,
(SEQIDNO: 5392)
HRLLGPSRW,;
CCDS1943.1, Del, C_8,
(SEQIDNO: 5393)
LILWPQAAP,;
CCDS8932.1, Ins, C_8,
(SEQIDNO: 5394)
PRCSPAWNL,;
CCDS13213.2, Ins, C_8,
(SEQIDNO: 5395)
PSIYQRQKT,;
CCDS46137.1, Ins, C_8,
(SEQIDNO: 5396)
PTQVGTSDP,;
CCDS32879.1, Del, C_8,
(SEQIDNO: 5397)
RTPTSPAAT,;
CCDS12921.1, Del, C_8,
(SEQIDNO: 5398)
GSVWILPC,;
CCDS54073.1, Del, C_8,
(SEQIDNO: 5399)
LHLCQPLR,;
CCDS11423.1, Ins, C_8,
(SEQIDNO: 5400)
PGEGHHHQ,;
CCDS12027.1, Ins, C_8,
(SEQIDNO: 5401)
RPPPAGSC,;
CCDS9239.1, Ins, C_9,;
(SEQIDNO: 5402)
PTTPGACGTLSHPVYCGHEFGTGRAVPRITVPAPAPPRGPPHSARILFAV
RVPISATSPSETPAPAPSTPAGFHPPV,;
CCDS10383.1, Ins, C_9,;
(SEQIDNO: 5403)
PWAWRHTLPGCQCRTCGLREPALPQGSAQLPGPAVPGTRPAEPQEERPAD
SRGG,;
CCDS45938.1, Del, C_9,
(SEQIDNO: 5404)
LPGGIASRFPASWPRTPAACHPSLRTGT,;
CCDS12767.1, Del, C_9,
(SEQIDNO: 5405)
PAVFASSRPTSPASCRRPPSSWWR,;
CCDS43896.1, Del, C_9,
(SEQIDNO: 5406)
PCRPRVTPAPPPCRPRVTPGPPP,;
CCDS13085.1, Ins, C_9,;
(SEQIDNO: 5407)
PHPRNKQGNFRGRPLLCS,;
CCDS10383.1, Del, C_9,;
(SEQIDNO: 5409)
LGLEAHTARVPV,;
CCDS58446.1, Del, C_9,
(SEQIDNO: 5410)
ECCSSWLRRIE,;
CCDS9239.1, Del, C_9,;
(SEQIDNO: 5411)
HHPRCLRDA,;
CCDS2221.2, Ins, G_7,
(SEQIDNO: 5414)
GTASAFSVPAFRNSCSHPPTPHHCSWLHLPGPWFDTYCTVGSDKQFSKFS
QKESFLHGRARRYGLQLWKLQLWPTEIYTESYVQNARQQHFKHKSGEW
L,;
CCDS8078.1, Ins, G_7,
(SEQIDNO: 5415)
VPAPPPGPGWAPAAASTAAAATSAAAVAAVAAVAAGGGRGGPGLLQPQMP
PRPPLPQQARHRAHRHQPHALPHPRRPRRDHIHLWEGGSAHHLHVAPQ,;
CCDS7694.1, Del, G_7,
(SEQIDNO: 5416)
VRRRRRPAQTCCGQIPGIPFSSLHAWNLRAWRTCWSPAPTPPPTWSRTSR
SPDTRACNLCTCPSFIPTTTLASPTWRRTTSASTASLRCIWRGLGSIN
T,;
CCDS58996.1, Ins, G_7,
(SEQIDNO: 5417)
AAAAGGPAAAGGAAELQEETGRGTPGGEAAVAPQEDERGGWPRRRPWQEG
PGRERSAERTREEGSAGAQSGEESAEAGHGREEHARQTSTWQGGQRLL,;
CCDS8891.1, Ins, G_7,
(SEQIDNO: 5418)
GALQPASPVRGARAGRLPRVRLAAAQPRAAPREHQVADLEQTAAQGGAQH
QPRGGEAAAAQGAAAAADPGPTRLPGRRAAARGLPGGGRVPRHHRDRH,;
CCDS10624.2, Del, G_7,
(SEQIDNO: 5419)
GKMILLLQEWSRAISGGIAKRRRLHGMTRKRINRDGVMDKNQAKGGLFLP
VITGEKLQGITIGVRPIRNPAQEVVTVTGPFPVGTNLVKLVLSLGETT,;
CCDS6988.1, Del, G_7,
(SEQIDNO: 5421)
SGARETRGPRAPPGACPACPLRASRRCCPPSSSTLERVSPGGAGRLASSA
PTWGCLCRAPPSRPSGRPRPDPALSLEAHTCWQRRTAAPGQPGRHRQG,;
CCDS7694.1, Ins, G_7,
(SEQIDNO: 5422)
ASAAGGDQRRHAAARSQGYLFPHSTHGIFEPGERAGALRLRPHLRGQGLP
DRQIPGPAICVPVLRLSQRLHSPHPHGDGQQVLLPRVSAVSGEVWVL,;
CCDS45634.1, Del, G_7,
(SEQIDNO: 5424)
LVWAQPGMALWHGPLAPYPLPAPCPALWMHPQQTVAAGWVPTGESGPPSA
KGSYWSWRGRLQHGPTPTSAPMSTWPGSLAFLRPRYRCGSRSAGPK,;
CCDS10912.1, Del, G_7,
(SEQIDNO: 5425)
CPLASTPPPPGAPATPRGRPAAEGLRPTPPMPMAMVTRRRAAVTIETGCC
TWAPEPRWRMLYLCTSHPGGSARIVVSSAPFAPSLWLLTRWKCTL,;
CCDS53777.1, Del, G_7,
(SEQIDNO: 5426)
AVRHPGLAGAGARAGGRRAAAGAAGGDPGLGSSPGGGARRRCWRSSGRCR
ARCSSRRAGTRRSSPNTWLTSATSSATSVAATAGMESISHSLLC,;
CCDS34507.1, Ins, G_7,
(SEQIDNO: 5427)
GPGLPLAGAALPRALQRRGLLPGLQCLWLCGQAQAGVAAPAAHPQLCGGL
LPLGEGHGCVAGRVPAPAERLLQPLLGPAGNGGQPAQRPGRQLL,;
CCDS12519.1, Ins, G_7,
(SEQIDNO: 5428)
PHAQVHGPSVPHPAQPAAPESQGPHLPHRWLPRVPDSRGAAGPLGFPAQP
CAPAPAAARRPLAPQRPPRRDPPLLPASRPLPGGAEHRPRRRRG,;
CCDS6434.1, Del, G_7,
(SEQIDNO: 5429)
TLFIHPTRMAVLRTGQINPPTPGLGSTAPPQGFCRKTWAGLWGAQPPATG
ACAARRSDTTRCFSGTRSSTPAPSPSSAQSAGRPSSKAPSCCGTS,;
CCDS32498.1, Del, G_7,
(SEQIDNO: 5431)
STITLGFGWMLILGKDTAEPSPRAPRTTARSCRLRRTSSLIRWRCGRLET
PQRSSWPRATRASWMRTLRPRPCWRSVGIRATAKGSGKSRTMN,;
CCDS10750.1, Ins, G_7,
(SEQIDNO: 5432)
VSTGGSGRAFRPAALSGRRRRRRSQTGLSAAGQVPGLDQPAVSRPTARPP
PAPALPAGLCPSAPAGTSRSRGPPGCRRRLRSASGARRRNRSL,;
CCDS1951.1, Del, G_7,
(SEQIDNO: 5433)
QCCCCCGAGVGVLRPSSPPSLARRPLLPGVSTTSSQMWWRRQHLPWSISR
SWTGTLSWAARSLSRTAQDSWWLPMGSLSPTPMWWLIGAESV,;
CCDS13710.1, Ins, G_7,
(SEQIDNO: 5436)
GQELQHEAAAEEHFPQRPGQGGSDHRGLDFIHRGVPHRRHEAGRRGGAGL
QPEQQLQGRRAHHHRSRHLGHCPPPRGPDPSHGQLPRRVHTG,;
CCDS956.1, Ins, G_7,
(SEQIDNO: 5437)
RLGGRQRRRHPPGRATFGYGEGGLGPARDRGRGGRRGDWRKRRRKPPVHP
HARLPEGRAAAAHWRRGPRRHRDPREAAFLRAHPPRGAA,;
CCDS46366.2, Del, G_7,
(SEQIDNO: 5438)
QEATSTTWTTYCRRRGNRPWSRSERGCFCRSVSISTPWILMKRKCHSHPS
TGCWWKSTQCPCRPSRRSIQVRLCFCPGVTPCHASWTPHS,;
CCDS12673.1, Del, G_7,
(SEQIDNO: 5439)
RWRRRRRPKRRRRKRASSCRLCRRPRVRRRRRPGPGRAQRLRELRARDPR
ASPGRPPRPLPNRPRASASRPSRWRASARRCSRRATPAA,;
CCDS31847.1, Del, G_7,
(SEQIDNO: 5440)
GEAAAAGRPSLAAPPGTATATRRSTTGRSRGPGAWPATRSRGPDPCRRPR
RRCRPRARWTPCRSAVAWTADSEPLSAGSASRARSRGSS,;
CCDS32830.1, Del, G_7,
(SEQIDNO: 5441)
TGGRRMTRRTMTTTKMMMMRRTKRRRRKRRRMTMMTRRTLLTKKTCLTPR
TSAATKALPRQTISQRRPIQTPPGTSLTPSRLAVLAIWG,;
CCDS30670.1, Del, G_7,
(SEQIDNO: 5442)
TPPVARMGRSPAAGCGAAATSKPWGMRRAETQTAAPRHLPKQSPDASPPV
APPAWTRPGSTAVSHPGSTPGAPSLATAVPSPLDSSAMS,;
CCDS53777.1, Ins, G_7,
(SEQIDNO: 5444)
LRSDTQGWPGRGRARGAAGRPLGPRAGTRASGPRLEAAREGAAGAALGAA
GRGAAHGAQVPGEVHPIHGSRPQLRRRPRWRPPQGWRA,;
CCDS780.2, Del, G_7,
(SEQIDNO: 5446)
LVHLGPKVRVVIQVLRALEASRVPLVQRENLEKGVVQVQMEEEECQENLG
QREIEGLMDFRVCQVTKVTGVNEVLKVLQVLLVMME,;
CCDS32830.1, Del, G_7,
(SEQIDNO: 5447)
RRMTRRTMTTTKMMMMRRTKRRRRKRRRMTMMTRRTLLTKKTCLTPRTSA
ATKALPRQTISQRRPIQTPPGTSLTPSRLAVLAIWG,;
CCDS11607.1, Ins, G_7,
(SEQIDNO: 5448)
SLRAHPWLSAPGCNCAPSLPDFSPLHPQCGISLVPRGTPLDLWTSRPGQE
AATRNPRPLLLKFTASVVVPDSSPAPGTTSTWGGAF,;
CCDS46134.1, Ins, G_7,
(SEQIDNO: 5449)
GPCRPADLHQPGAPHQPRCVCAGQWAGPIWDPHCPQPRPRPGTHGRHRPP
SSASSREQGFCQQPPDPECGQGRFLRAREALRAAV,;
CCDS41781.2, Ins, G_7,
(SEQIDNO: 5451)
DTGGSGLGHKQPEAAGTWTYGGSRGPSLLLSLHGGPGGPGACLTKELPHQ
SGAGQEPAGRGPVPPGTPYPCQSANLSPKPGQAQ,;
CCDS9548.1, Ins, G_7,
(SEQIDNO: 5452)
GCGCGPAGQYGGAVGLARRGTAGCLPCPPWLCCCCAFPACGLPVTDGWRG
WQGSGVVRVSGSAPWAPGFPFSLSCPLCGTQPRW,;
CCDS7644.1, Del, G_7,
(SEQIDNO: 5453)
RCPGRGPAASATEANCSMVTWLLWALRLLCRQHPPELETRLAVPPAHHLS
TSWRRQPPILPLAWAPMPHTSPPTPGTALPPLAP,;
CCDS7916.1, Del, G_7,
(SEQIDNO: 5455)
PRPRPPPPRSWGCTSLRLPISGSPMTSAWRSLRMKTSRRSLMSVASAYSA
KTPCPYGPRAPGCSLRAAAARGAGCRPRCCRWT,;
CCDS46218.1, Ins, G_7,
(SEQIDNO: 5457)
RGAPGAGGRTGAAAAGGGTRPGAAEAPLGGAQGPAAPRAGLRPGPRGGGG
AGAFAGAASGNCSSRSEDEGQVSKTPYRPSLF,;
CCDS10389.1, Del, G_7,
(SEQIDNO: 5458)
RTPASCVRTLTWTWQWSVPIRECSSTKASVARQPPGCSWRSRSTLSLSGG
AWSMPRNGPWETPSMSKQNRGLRLIKSSSTKS,;
CCDS32107.1, Del, G_7,
(SEQIDNO: 5459)
RILSSPSGCGCVVAVWRSSPAAGWAMSSGNGTPTTSLRVMPSPTSGILSA
LQKCGWMNTSNTTMRPGPRPSGRPSAVWLRG,;
CCDS13.1, Del, G_7,
(SEQIDNO: 5460)
AGARPPGNSATTTCPTRWAAATCSRPTWCTTCASAATTCAPGTARTCLWA
PGWRRWTSSGSTTRASTPNTGPAAAATSTW,;
CCDS47165.1, Del, G_7,
(SEQIDNO: 5461)
RVAVKKAGRAQPVIREPATPAVPSTGPARMASVNAARAGMESTALSRVVL
VCATAMEDVPWTKMAGIVCASLDGEEQAVT,;
CCDS12474.1, Ins, G_7,
(SEQIDNO: 5462)
VCFPAFSLVGQHLLVLPRGLPCPSLHRTEPNQRLCLALSCGLPLLGDSAH
LLDHEILPDLPAPLGCPWGLPLLHHTPGHPL,;
CCDS34561.1, Ins, G_7,
(SEQIDNO: 5463)
GGDTAPSAAPTCPVHLQSVQWHRAQLTARSLPGPYRQRLPVGLPVLLQPP
EPTRQRPRPHRLRQLGLHGGRGPVPALSA,;
CCDS11091.1, Del, G_7,
(SEQIDNO: 5464)
QGARGGPRSGPPSPSPAVAVSLSPPAEGAAFGGVGKQVGLAMGALLHPEA
QLGVPLISEPTQGSIPMDRPLAWPSPTTP,;
CCDS8932.1, Del, G_7,
(SEQIDNO: 5465)
RSTGLTGEQTHWLRPTSGPATMSPWYRGPTPSPLTCRCTTPPASPWLPIP
VRPMGARAPAPTCVSSTTTGPCPAPAPTS,;
CCDS42992.1, Del, G_7,
(SEQIDNO: 5467)
CRWRCLGRSEAMSWHTSGMGGCPGLASSSPASSWPARASPWARAWRQPWK
TSGPSSSSSLSCVRCSAGIERCFGRGRD,;
CCDS58065.1, Del, G_7,
(SEQIDNO: 5468)
PLSGTWGTLRAPSSFHPLVATQALLSQRGHPRTALGGSQPLSATPSRVLP
PRRAAAPTQQLPHALLAPSLQDLAKRPP,;
CCDS13149.1, Del, G_7,
(SEQIDNO: 5469)
RTRLTLTGTRSSGTRASPSAVCLCCWTCPSRSFPAASPSGLRAPVGAQAP
PEVTLRASCASSASKACAGLWPWGAQVR,;
CCDS48044.1, Del, G_7,
(SEQIDNO: 5472)
SWGPAASTAAVSAAAVAGACESLRGQRTAPEPSPDGELPVRPIARAQSMK
NFPSAAGRGAPRTGMKARSWRGRRAP,;
CCDS5707.1, Ins, G_7,
(SEQIDNO: 5473)
AVCAGPRHPGRPRLPALGPCTAAVWGMAQPGGPCPGEGFCGSNPLTLRAP
GGSASAANLRPRWHEAQHVGPRFLR,;
CCDS53264.1, Ins, G_7,
(SEQIDNO: 5474)
GPRALAAAVQATGLGPPRQRGADGGRGGRLLPGAGGRRRELHQPPRSEPA
GPGRRGSRAQGPSGLRPALPSARAG,;
CCDS59068.1, Ins, G_7,
(SEQIDNO: 5475)
AVCAGPRHPGRPRLPALGPCTAAVWGMAQPGGPCPGEGFCGSNPLTLRAP
GGSASAANLRPRVWDAITLGIQVM,;
CCDS1942.2, Ins, G_7,
(SEQIDNO: 5477)
RTGRAAGRAGCGSGPHGALLQRSTGFHPFLPTWRPRPHGSVSAAIPLRPA
AALLCPRLSPSAPLRLLPHRPGTL,;
CCDS58679.1, Del, G_7,
(SEQIDNO: 5478)
TWRSSSTRREARSQGLQQPRPRNLSPSTSCRSILLRLSTTRAATTADSSS
SMWPVVWSIFSSLSLGPVWHPEGT,;
CCDS31576.1, Del, G_7,
(SEQIDNO: 5480)
PSSLDRSQSPITMVTNTWLLPLLSSSKARLCATIEWTLMAQDTCWETWKA
GSSCCFWRRRNRWMAPSLSRISV,;
CCDS58680.1, Del, G_7,
(SEQIDNO: 5482)
TWRSSSTRREARSQGLQPRPRNLSPSTSCRSILLRLSTTRAATTADSSSS
MWPVVWSIFSSLSLGPVWHPEGT,;
CCDS10047.2, Del, G_7,
(SEQIDNO: 5483)
EEEVGEVVGEGEEGGGEEEEVVEEVSKAGEIMVEEGVMVEEGAMVEEAME
IHMEEVVVVVVVVVEEVDIEDT,;
CCDS13024.2, Ins, G_7,
(SEQIDNO: 5484)
GPGSAVAAPPAARSHGNGEGRRPQRYTKPGAEKAKPSAAGAQHEAEAGGG
GPGHGSGGGRGPGRGLPGAATA,;
CCDS10746.1, Ins, G_7,
(SEQIDNO: 5486)
VPKDHYRYVPADSAAFSAACHPPRLSFPRSGTQSSSGPPPHPPAPGQTGS
VGPGHVLLRVLSPAAPGSTGQP,;
CCDS43859.1, Ins, G_7,
(SEQIDNO: 5488)
PGRRRLLLGAARRARGQRVPGGRRAPAHRRRGRAHLRRRRRQGHPLLPRL
PARRDRSERGPAETCQRPGFV,;
CCDS59069.1, Ins, G_7,
(SEQIDNO: 5489)
AVCAGPRHPGRPRLPALGPCTAAVWGMAQPGGPCPGEGFCGSNPLTLRAP
GGSASAANLRPRVKLASPAV,;
CCDS12645.1, Ins, G_7,
(SEQIDNO: 5490)
DTAGAAASGWGVLGLHPAEGEEEEEEPWRSRRRSQWRRGILRSESSGVGK
WGPRLLDTSSPWSHGTRWQG,;
CCDS872.1, Ins, G_7,
(SEQIDNO: 5491)
GGRGLLGLGPGCFISCGLSGHWSCRGRSIDAGSSSSLGSRSGSLGRAASW
TASLAPGHLRRVSAELAEPA,;
CCDS5873.2, Ins, G_7,
(SEQIDNO: 5492)
GLPGGSCGHLCGSCRARGGWSRGPGRRQPPQAALQRGGQVDGSCRGLPLP
AWIPTSTRRQGLPSLPTGAL,;
CCDS44230.1, Del, G_7,
(SEQIDNO: 5493)
SWRVMQEVNPPNQHQTGAPRGHFIGLMMYGLWTPILEPERTMILIPRFPR
RVLARFYSPSPNPISRASL,;
CCDS33469.1, Del, G_7,
(SEQIDNO: 5494)
CLASPRTPSWALPVSLRASSWQARPPLGGGRGVAGGNPSRKRMQWQLILV
QRNWRQALRVSYPCRKS,;
CCDS4080.1, Ins, G_7,
(SEQIDNO: 5495)
DRGPAGGAALWAVVRTAGAGQHHRTACEAHRDGDPGARDLPEPQEFNSFS
TFNPVPRTPRACQNSQK,;
CCDS9585.1, Ins, G_7,
(SEQIDNO: 5497)
AVRQHYGDCHAQRCQRQPPQVPTEPIPVLRGGDSWTWHTGGPAPGPGPRP
GGQRPDGIQHPGWGGV,;
CCDS2897.1, Ins, G_7,
(SEQIDNO: 5498)
GPSVRRQRLVQNQLWRVLQGRAGPGAVRAARGQGHQAAGHQPGCGAAGQR
LALLLQLPGLDRVPAV,;
CCDS31847.1, Ins, G_7,
(SEQIDNO: 5499)
PGRRLRLGALRWLLHPGRRRRRGGVLRVGAAGPGPGRRQGAAGRTPAAAR
AAAAAPGRAGRPVA
QQ,;
CCDS46134.1, Del, G_7,
(SEQIDNO: 5500)
PLPPRRPPPAWGPSPAPLRLCWSVGRPHLGPPLPPATPPPRHPWPPQASL
LCFQPRTRLLPATSRP,;
CCDS35004.1, Del, G_7,
(SEQIDNO: 5503)
RGDREATGSGWVPGCAPFGQAGSRASRSPRPSVVRLPLGVHLPGVLPAGM
TDPPGAPPPALAGRG,;
CCDS46218.1, Del, G_7,
(SEQIDNO: 5504)
RSPGSRRTDRRCCGWWWNSSRSCGSTTRRSTRACSSSGGTAPWAARRRRG
WGLRRSSEWKLFLEI,;
CCDS33807.1, Ins, G_7,
(SEQIDNO: 5505)
AAAMAAGSGGRGTPAAGRGCHIPVESAATAPGGQRPGRRQRPEAQQRTED
PGGQGQSGPGQRTP,;
CCDS32873.2, Del, G_7,
(SEQIDNO: 5507)
PTRMWMMSPRLQPWPGPRSPCRQMSPRARGIVGESRLIRGPRWTAATPRD
SGDRTACEPMNGKP,;
CCDS2479.1, Del, G_7,
(SEQIDNO: 5508)
QWAACATCRWAWSCCSWASCSPLSTSTDTSSLRSWPEITSSAVVCCMRTP
CPPRSGLRWSWKRM,;
CCDS33104.1, Del, G_7,
(SEQIDNO: 5509)
RPASSRCTTPSPRRRAAASRSRSPGRPPRPRPRHPRPLRPPPGPWPRRPP
PPTPTRSTGKPRLC,;
CCDS5715.1, Del, G_7,
(SEQIDNO: 5510)
SLPPGCFWPCLWNSLLRFCPASCSGCYSWTIPPTGSPFSCTTTRSSMNPT
SLTPGRSSRTTSQL,;
CCDS11693.2, Del, G_7,
(SEQIDNO: 5511)
AEQTPEVVVVRVRLRGTRHRLRPPERLREPRPEGVGVAAAETQPPLFPLF
AERRRVASIRQLP,;
CCDS12196.1, Ins, G_7,
(SEQIDNO: 5512)
AGGRHGWPRVRGHPRAQHLLWGHREGLLCPPLPWHCHQVRVLLCQSGPRF
WGALPALSCQRLR,;
CCDS58679.1, Ins, G_7,
(SEQIDNO: 5513)
GPGGAAARGGKPGARDSSSPDPGIFHRPLPAARFCSDSPPQELLQRPIPA
PLCGLWYGPSSHP,;
CCDS1810.1, Del, G_7,
(SEQIDNO: 5514)
PLEGPATPPLPRWCLPSWHQSWPWSLSWAWWGTVWPSSSSASTRGPGPPT
RCSWSAWWPLTSS,;
CCDS41842.1, Del, G_7,
(SEQIDNO: 5517)
ALPTGCGSCPPCPEASPLCSTRRCSTTGSPPPSNTSLIPGTRMSGKAPTG
PPQSGEPLASRS,;
CCDS55182.1, Del, G_7,
(SEQIDNO: 5518)
ALQTGPGSCPPSRAASLLFSIRRWSTISCPRPSATSQTPGRGVPPRAPAS
PGRRPLKKWPTP,;
CCDS59246.1, Del, G_7,
(SEQIDNO: 5519)
GGHVSGLLSPWKWQWLQGVCAREEGAATESPARTTMKARSTEGLWLAHKH
AWCTRQREQPRR,;
CCDS59279.1, Del, G_7,
(SEQIDNO: 5521)
MEETVVVAVATVETEVEAMEETGVVAAMEETEVGATEETEVAMEAKWEEE
TTTEMISATDHT,;
CCDS59399.1, Del, G_7,
(SEQIDNO: 5522)
PAVAVVGRWRSAARPSAACTTRPRCCDTATMTICRARAVWKWTTACRRWS
SGCSYRKTSWRS,;
CCDS10452.1, Del, G_7,
(SEQIDNO: 5523)
PGALVALGWGTAVASAEVSAVASGAGVAAVDGAGAEAAELAEARPRIRSG
CPSPSWAAWSRT,;
CCDS41865.1, Del, G_7,
(SEQIDNO: 5525)
SGRGRRRRSSLSCQGGWLSLTVSEGMSPKTWFLSRTSLTSILTCRSSCGH
TASRPTFQSRQL,;
CCDS30556.1, Ins, G_7,
(SEQIDNO: 5526)
AVPPGRGRGGWPPQPDTAQQPCVHQVLLKRPALGTGHENGRGGDQQQVGS
AARAAPGLRPL,;
CCDS11420.1, Del, G_7,
(SEQIDNO: 5528)
LAASSSTTASPRPSGTALSSLPPSTLRSPSPTMSVSRVTMTPPSLRDTPL
SATSPWKCSSS,;
CCDS5690.1, Ins, G_7,
(SEQIDNO: 5529)
PQRCWGDHAGCVAPRTWHPAMGPCSPGPLGNPEQHLSHPGRLWGQQPLRQ
HFILLLQVCVLP,;
CCDS14077.1, Del, G_7,
(SEQIDNO: 5530)
RSALGTFAAATPPAAAPSPTAPGTATGRSCTALPSRSESTASWFDSLHEE
LKRIRSQTHTA,;
CCDS10785.1, Del, G_7,
(SEQIDNO: 5531)
GALRAVVQSSPPTLRCSAAATTSPTLLFSCNSPQPWSLQSCWHLLRTSPS
WAAASPSWPR,;
CCDS11086.1, Ins, G_7,
(SEQIDNO: 5532)
SPAGRGCGLWAERGELRPAGFRCTPRAGGRRRCGAGHRAGDDADEPRGAP
GPSPVRLPKG,;
CCDS10908.1, Del, G_7,
(SEQIDNO: 5533)
SRSSATLPGRRRRRWLRRRRQPISVAPAGPPRRPNQKPNPPGGARCVIMR
PTWPGTSAFT,;
CCDS1810.1, Ins, G_7,
(SEQIDNO: 5534)
VLWRALPPHLFLAGVCLPGTNPGPGVCPGPGGEQFGPLHLLHPHAALDLQ
HGVPGQPGGR,;
CCDS6988.1, Ins, G_7,
(SEQIDNO: 5535)
QAGWPLQPPPGAASAGPLLLGLQGGPGRTQPCLWKPTLAGKEGRRPLANQ
EGTGRAEFA,;
CCDS6025.1, Del, G_7,
(SEQIDNO: 5536)
RGRGCWRSPRSASASCCKSALRGPPRRPPARPAALAPGTPPSAWTQRRCP
GTCPRRSSP,;
CCDS58850.1, Del, G_7,
(SEQIDNO: 5537)
SSWMPRAPRPLRPSIPPMEVSSARYPWPKSPTSTRQWPQPRMPLRMDGGG
RSVRGTGAG,;
CCDS13145.1, Del, G_7,
(SEQIDNO: 5538)
TPARSESGECFSPRRRPTSWSGAFGSSGTCRRPSANTWPASSASRPRRSR
SGSRTTATR,;
CCDS43896.1, Ins, G_7,
(SEQIDNO: 5540)
GPQQHHALRGVCWRCQRLSADPLPLQQGPHPASHQPERRGPESLGHPEKP
TLLGQKGG,;
CCDS6097.2, Ins, G_7,
(SEQIDNO: 5541)
GRPQPPCPAHLSECEERGIGGLPHQAAQLRGPDLHSLPEEGGRGAGHTAR
KPWPEPPT,;
CCDS45544.1, Del, G_7,
(SEQIDNO: 5542)
PEAPSIRAAPPSLRAARAHQRTGRQHPPPAKHSSSQCTQGRRWGAWHPGS
WPVAQRMG,;
CCDS32996.1, Del, G_7,
(SEQIDNO: 5543)
SSGSGDSGVLLRASQRRQRQGRKRTESGTNMRRASGQESGTLRAPRSAQQ
RQSRITAP,;
CCDS47173.1, Del, G_7,
(SEQIDNO: 5545)
NRFRLCITILPGMKMSWSSEKVMSLMSWKSVMTAGLWGPQEEPNSLVLSP
ETTSRGC,;
CCDS12794.1, Del, G_7,
(SEQIDNO: 5546)
SGLTSRPMITSSRLLEMASASACPVSRPWMSLRLQGPSGSSVTSSWGRMW
PSSTAGT,;
CCDS1733.1, Ins, G_7,
(SEQIDNO: 5547)
AAGQCERGAGGAVGSVGGAGGRGHAGMRAALLWGPWGAGLSSQRDPQCLG
AQGAGQ,;
CCDS46136.1, Ins, G_7,
(SEQIDNO: 5548)
GTCLAAGVGPPGPPRQPLQPFLRGAVHAQRAACHQRPQPLREQRVLHPLG
GARLPS,;
CCDS55182.1, Ins, G_7,
(SEQIDNO: 5549)
LPCRLGLDRAPHLGQPHSCFPSGDGQLFPVPGLPLPARPLEGECRQGHRH
HQEEDL,;
CCDS34222.1, Del, G_7,
(SEQIDNO: 5550)
LPVNVHLVSHSITLLVSTTTNVGLNLRFVEQRESVKTLQAVSAVNAKEGS
LLMPPD,;
CCDS43859.1, Del, G_7,
(SEQIDNO: 5551)
RPPPPPPRRCPPRPGAACSRRAAGPCSPAARPCTSPPPAPPRPPSTAASS
CSTGPK,;
CCDS3359.2, Del, G_7,
(SEQIDNO: 5552)
AACASASSVRPSRRRRAASSTTASWSASLTRPSAACGSTRARSCSTPCWR
RCASP,;
CCDS10047.2, Del, G_7,
(SEQIDNO: 5553)
EEEVVEEVSKAGEIMVEEGVMVEEGAMVEEAMEIHMEEVVVVVVVVVEEV
DIEDT,;
CCDS1955.1, Ins, G_7,
(SEQIDNO: 5554)
GPLCCHCEKLPGDGANYHQSSGSCRGLDSDRYLAFLAERPSLCRSRGLEP
SRMGG,;
CCDS6988.1, Del, G_7,
(SEQIDNO: 5555)
GRLASSAPTWGCLCRAPPSRPSGRPRPDPALSLEAHTCWQRRTAAPGQPG
RHRQG,;
CCDS45938.1, Ins, G_7,
(SEQIDNO: 5556)
LSEGPSPPQPLRPPAATPPNHSALWKEPAPSPQQETPAGRGNFRAPRGGD
TPTEP,;
CCDS59279.1, Ins, G_7,
(SEQIDNO: 5557)
LWRRPWWWQWLRWRPKWRLWRRQEWWRLWRRPRWGLRRRPRWLWRQNGRK
KRLQK,;
CCDS5194.1, Del, G_7,
(SEQIDNO: 5558)
PWRRRPVAGRRRRARRAPEARRAPEARGLAPRTLRPPRGLRPRAMPKTKP
HVPLP,;
CCDS32871.1, Del, G_7,
(SEQIDNO: 5560)
LPQWRKRPVSLRRRHLGRLMTCWKATWAFGTPSWRPPWWRRPRRQRAPRS
LHAV,;
CCDS41590.1, Del, G_7,
(SEQIDNO: 5561)
QPCSRSRSSSRLISPTRRVGRRRRRTASTPSPSPCSQAPAVASRGWWRPS
RPSC,;
CCDS9991.1, Del, G_7,
(SEQIDNO: 5562)
TTPATRWWWMGKSTTSTCCPAASSTPRPCPSLATGWSSTCQACLRKQRRM
KRKA,;
CCDS31598.1, Ins, G_7,
(SEQIDNO: 5563)
AHGLRTQLPGEQLLAPRRLPPLQSPDPGHLQAGPQMPSLWSELPQAVQGS
PVS,;
CCDS2164.1, Ins, G_7,
(SEQIDNO: 5565)
GDSLLSTQQAGAVGTPGFIHRPARRREQGPRRGHTRDWHTVQGCLSRGRD
TRSL,;
CCDS34507.1, Del, G_7,
(SEQIDNO: 5567)
TWPAACWCSSSPSSSATWTSPGAAVPVALRPSASWSRCTCSSSATMWRST
TPR,;
CCDS11439.1, Del, G_7,
(SEQIDNO: 5568)
CHPAWLSPISACPRLLPYPFHVLALEVTFPPGTAMPQMQLQALAMWEKGW
DK,;
CCDS7296.1, Del, G_7,
(SEQIDNO: 5569)
RNPRLPNHGRPKSPNQRTAIKKELQIPPLKMGQGMDSPFCLLRALFWDRS
CP,;
CCDS14077.1, Ins, G_7,
(SEQIDNO: 5571)
EEALWAHLQQPPLLLLHRLQQLLELRRGGPAQPCHRGQSPLPAGSTLCTR
N,;
CCDS12604.2, Del, G_7,
(SEQIDNO: 5572)
LTVACRSAQPTVAATAPAPRPWDHAAVSLASWDVPVTCTCGRTRGLGGGT
T,;
CCDS6714.1, Ins, G_7,
(SEQIDNO: 5573)
AAPCCRAGPGLSAPAQURRRLRSGADFQGEGYWPESAAVAESEVSETL
I,;
CCDS54360.1, Del, G_7,
(SEQIDNO: 5575)
CQKIKLALSSPPRCGLLCSTMATWAASGICSSMAKAKISGKWLKFKVLL
E,;
CCDS35004.1, Ins, G_7,
(SEQIDNO: 5576)
GAETARRPGAAGFPAARPSARPGAAPVGAPGPAWSASLWASTCPEYCQR
A,;
CCDS43789.1, Ins, G_7,
(SEQIDNO: 5577)
GSSGSCSPPQRAHGVQTARGHLGRGGDGDPDAAAGGRAEQPKGGVGPVS
G,;
CCDS45544.1, Del, G_7,
(SEQIDNO: 5578)
SCQHLRPAGTLPAPSSCWPVLLPGHLWKRQMASKPRQILGLRIPRWLPR
L,;
CCDS5941.2, Del, G_7,
(SEQIDNO: 5579)
SSSPHICQRGPTHTRLSLQGSKASKEFTRRRRPSCTDEAEEWPVPWAGG
A,;
CCDS11486.1, Del, G_7,
(SEQIDNO: 5580)
YPSWEAQEPLRSRNPAVWLGRAPGERSESSSWTQGSARSHQGARLSIWP
R,;
CCDS42397.1, Del, G_7,
(SEQIDNO: 5583)
TMCLCPTSSREAGRTLLSRSPGRGQSQSWGSNELSRGARGRTMPSPTG
T,;
CCDS6607.1, Ins, G_7,
(SEQIDNO: 5584)
GFCEWTATPGCSPPEDSGTCSSRCQALRHLQAASGQPWLCQQNSWQVL,;
CCDS6996.2, Ins, G_7,
(SEQIDNO: 5585)
GLAPHRHGPHQELRRGGIEARPAWRRWQPPENGAYKPVLLGLRDSTGL,;
CCDS9602.1, Ins, G_7,
(SEQIDNO: 5586)
GPGATCLLCAPPLQCPGRRHFPATTGAGGSLVHWGVWGPPAGRELRGD,;
CCDS31754.1, Ins, G_7,
(SEQIDNO: 5587)
GSARPDWAGRRGGSLTLTPRRGGGAQLLGRRDMAGAEAEAGRPHDRLD,;
CCDS7694.1, Del, G_7,
(SEQIDNO: 5588)
KTGSSWTGSCRQGWRWSGSDCGISITTTTPRGACGASAAGRALARGRL,;
CCDS56255.1, Ins, G_7,
(SEQIDNO: 5589)
PGGPGCTRCSGWCKGCRADRSNPSGFNPTRRCSPPPDRPGGGPGCGEG,;
CCDS33764.1, Ins, G_7,
(SEQIDNO: 5590)
VQGQRRHRHALRLPTLRLFPAVPPVSTKDIGQARRRTHGDSHRQRHCL,;
CCDS5715.1, Ins, G_7,
(SEQIDNO: 5591)
AASPPGVSGRVCGTAYSVSAPLPAAAATPGLSPRQGHPFPAQQRGLP,;
CCDS10452.1, Ins, G_7,
(SEQIDNO: 5592)
ARGPWWPWDGEPRWLPRRFRQWHPGPGSRPWTGPGPRPRSSRRQGRG,;
CCDS6919.1, Ins, G_7,
(SEQIDNO: 5594)
EATVHEPVLSDLVLLPSAGPQAGHSQQLQQDQEASHAFIHRGTQLPVF,;
CCDS6204.1, Ins, G_7,
(SEQIDNO: 5595)
GHLHQCLCDYTHVLPVTVLHAHREVCAQSQCLHQQRELLFPLVAGHA,;
CCDS45072.1, Del, G_7,
(SEQIDNO: 5596)
GSATKMSTNAARRTGAASRSATTSRVASTVPATAASSSPLMAGPAKT,;
CCDS46339.1, Del, G_7,
(SEQIDNO: 5597)
LWLLSPSRKRRRGSSPPGRHWLCPQTRRSPCPPMPTRRSLAPTAAGS,;
CCDS46539.1, Del, G_7,
(SEQIDNO: 5598)
PCRRPPTAPASRPPAWPSRRPPAGPCKPPEPGNQWKEPGRGQASPDC,;
CCDS6996.2, Del, G_7,
(SEQIDNO: 5600)
SCSPQARTASGAAEGWDRGQASMAEVAAARKWRLQASSSWPQGQHRP,;
CCDS7957.1, Del, G_7,
(SEQIDNO: 5601)
TGVRTSEGSRCAPALPARRPRTPEALRSRPGSPALCFASCSWCPTTS,;
CCDS30901.1, Del, G_7,
(SEQIDNO: 5602)
TRLSPMWAVLPRCSFLPHGPVLTASFWLPWALTDMWPSVLHSTMPAT,;
CCDS2832.1, Ins, G_7,
(SEQIDNO: 5603)
AAGAQEVRSDRRLPVVQAGAGPGCERQSAGVLPSAHWTEVCPEAPV,;
CCDS53360.1, Del, G_7,
(SEQIDNO: 5605)
GARVSTLPPRRRSQRWGLSRKIGCRSPGVVSLAVAWPPDASQGSRS,;
CCDS41741.1, Del, G_7,
(SEQIDNO: 5606)
GSGSARLPSRRTPPCRRVRGPASPMGMRRRAQPSASTRRCSACSTS,;
CCDS46546.1, Del, G_7,
(SEQIDNO: 5608)
PRKMILSQLFIHSMTRFWRWSPCSAACRWPSLESSGYSIIGSPSVAR,;
CCDS10864.1, Ins, G_7,
(SEQIDNO: 5609)
RGQDPARPGFRRQQPDPSHRAPEDPGAAAVSCLHQLAAALQLHMVT,;
CCDS10912.1, Ins, G_7,
(SEQIDNO: 5612)
GALWPLHPRLPGHRRLREGARRRRVCVRLHLCPWQWLPGDGRRSP,;
CCDS4748.1, Ins, G_7,
(SEQIDNO: 5613)
GPGRPREARHRGHSAADNDFIHRPEPGRGPGQETRPKLPPNEACSL,;
CCDS12474.1, Del, G_7,
(SEQIDNO: 5614)
LLSCLFSGWSTSSGSSERPSLSQPTQNRAKSKAMSGAQLWASSSG,;
CCDS46136.1, Del, G_7,
(SEQIDNO: 5617)
RPRRKGSLGRGLPPSHPTQERPGHLQTRVRSHSRGPGRSRPSWFK,;
CCDS9830.1, Del, G_7,
(SEQIDNO: 5618)
SCHFSSSSSGSRRSPAQPTMPGSMSCWALAPARPCPPGRCWAWRS,;
CCDS46196.1, Ins, G_7,
(SEQIDNO: 5621)
GAGCPRRCQIRAWCRARVDGRCGVWRRRTGPPRLPPKPLGPEQL,;
CCDS55562.1, Ins, G_7,
(SEQIDNO: 5622)
GLHPFIHRPEGGVCRWNEQVGTLLPGEHDRVCGKESARRPCHRQR,;
CCDS33159.2, Del, G_7,
(SEQIDNO: 5623)
GPKKGARHRWPVPAPLLSASASTSLPSPSSCPHTLFRKNPLWRC,;
CCDS10363.1, Del, G_7,
(SEQIDNO: 5624)
LPHVERYLPKRNPPASLDPVQPHILLKRHQEPIANWGLWLHRSL,;
CCDS9548.1, Del, G_7,
(SEQIDNO: 5625)
LWLWAGWTVWWSCGPGEKGHGWLPSLPTMALLLLRFSCMRVASY,;
CCDS13024.2, Del, G_7,
(SEQIDNO: 5626)
PGQRRCCSPRRPQPWKRGRTAPAEVHKARSGKGEAQCRGRPARS,;
CCDS9991.1, Ins, G_7,
(SEQIDNO: 5627)
QQRRPHGGGGWERVRLPPAAQRHHQHQGRVLHWQRGGHPLARLV,;
CCDS10904.1, Del, G_7,
(SEQIDNO: 5628)
TSRPCTSTSTTSLLPMALLCVKRGRRCTKAKATAVSAAVSTEQI,;
CCDS33415.1, Ins, G_7,
(SEQIDNO: 5629)
EREGETERQGPRARPGQREGQGQTESEKRGALLGPGQGEEQRA,;
CCDS47200.1, Del, G_7,
(SEQIDNO: 5630)
HGAKVRKRKRETRIQPPRNRSHCLPCLPWVHLHQNPTDHQMLT,;
CCDS10670.1, Ins, G_7,
(SEQIDNO: 5631)
HGLLPLPRDHIHLRDSLPEPTDHTTEDCSQSLCQRLPGERQKL,;
CCDS30556.1, Del, G_7,
(SEQIDNO: 5632)
PWPALAWCAWAWSASASSCSLASPALPDAWPSSPCPTSRSRAA,;
CCDS48074.1, Del, G_7,
(SEQIDNO: 5633)
RVRIQPLVLESRVKIQHPVRACRVQIHHWVLTSLLRAFRSRPR,;
CCDS11962.1, Del, G_7,
(SEQIDNO: 5634)
TLSHQIKSSFGQKMGKVIFTNYLPVAFQLVIHSAVMWGRQLKI,;
CCDS6876.1, Del, G_7,
(SEQIDNO: 5635)
TSQRFSSTALACAPSRIQFPMGLAGLSQCPPPLSEMTLSFRLV,;
CCDS31763.1, Del, G_7,
(SEQIDNO: 5636)
VSTSWGPTAGAARARTCSPCSPTTPSPASGSTSRRTRPNRVLT,;
CCDS7163.1, Del, G_7,
(SEQIDNO: 5637)
WWCTRGGGKRKKKMCKVSGGCTACVERCPWKGICWKWPVTVAA,;
CCDS3936.1, Del, G_7,
(SEQIDNO: 5638)
ALSVYQFFIPQREVKISTIILPSNKPFKPLTKRILVLLGSIK,;
CCDS47200.1, Ins, G_7,
(SEQIDNO: 5639)
AMGPKSGKGKGRQEFSHPETEAIASLVYLGSTSTKTQQTTKC,;
CCDS8190.1, Del, G_7,
(SEQIDNO: 5640)
GAWELGGLARWGPLCTHPQCQVLLLSSSTTSSSSSSSSSSLV,;
CCDS13064.1, Del, G_7,
(SEQIDNO: 5641)
KERNWGRKRRWRRRVMLIVMKKRRKMRRAPRRAWRLRTGPRE,;
CCDS12398.1, Del, G_7,
(SEQIDNO: 5642)
PGVQGAAVMPTGACATTGIAITPRNATTPSASRPTCRGACSS,;
CCDS31763.1, Ins, G_7,
(SEQIDNO: 5643)
VSPRAGAQPQEQPERGHAHRAVLQHRHPPVALPQGEHVQIGS,;
CCDS45544.1, Ins, G_7,
(SEQIDNO: 5644)
AAASISVLQGPSRPPAAAGLFSCLGTSGRGRWRPSHDRYWG,;
CCDS33807.1, Del, G_7,
(SEQIDNO: 5645)
CRDGSWLWRSGHPCCWARVPYTCGVGSNGAGRPEAGATPAA,;
CCDS4155.1, Ins, G_7,
(SEQIDNO: 5646)
GYWAESTACLHRSEEHGCHLAGQPADPSPVALHPGHSLCTV,;
CCDS53272.1, Del, G_7,
(SEQIDNO: 5647)
PEPLEPMTSQGAHTTSCAGRRRRSSRRHISPWGTGATRTCS,;
CCDS54254.1, Del, G_7,
(SEQIDNO: 5648)
SSTEGPCTEMEGKEGRGLVPHPLTPLPAGPSTLRARPEATA,;
CCDS22.1, Ins, G_7,
(SEQIDNO: 5649)
ATRGTPCPGAGCRPPGIDRQPPVLPEGYGEPLRVLRGHHV,;
CCDS6714.1, Del, G_7,
(SEQIDNO: 5650)
CAVLPRRTGTICTGPATATPPSLWSRFPRGRLLAGKRRCG,;
CCDS3476.1, Del, G_7,
(SEQIDNO: 5651)
CPLSLWKRLKVFSRDGLSEDQVLHRLTVGKSHLLEFQTPL,;
CCDS48044.1, Ins, G_7,
(SEQIDNO: 5652)
GPGGPQHLLQQSAQRPWPGPARVCAARGLPQSQAPTESCQ,;
CCDS46136.1, Del, G_7,
(SEQIDNO: 5653)
HLPGSRRRPPRPPTPTPPTLSTRRCPRPACCLSSAPAAPP,;
CCDS5699.2, Del, G_7,
(SEQIDNO: 5654)
KGLGDRRAGAGRGQSGWSGEARDGSCKNSPGCVDGRRGSG,;
CCDS42402.1, Del, G_7,
(SEQIDNO: 5655)
LCTAKWPGQYGPTWASCPLAQQCLAHTQFLRALGSPWGRD,;
CCDS33908.1, Del, G_7,
(SEQIDNO: 5656)
LKNAAASRSMESTQRSPITWTGCGSRWAYHKVLWSPRWNG,;
CCDS46366.2, Ins, G_7,
(SEQIDNO: 5657)
LRKLLQQPGLLTAGEEGTGPGAGAREAASAGVSQSQLLGS,;
CCDS32325.2, Ins, G_7,
(SEQIDNO: 5658)
PAAPEWPASRVLCASTSYSPPGGCPRPCAGHGAACLPPWR,;
CCDS8839.1, Del, G_7,
(SEQIDNO: 5659)
PPRVDSAQMWAIAPSREGQSLRAPPSCGRPLRSRRPARGI,;
CCDS11662.1, Ins, G_7,
(SEQIDNO: 5661)
QQRAPPHHPPCPPVHPGPCDASPDPTQHAGSAGGGLSQAS,;
CCDS46136.1, Del, G_7,
(SEQIDNO: 5662)
RREPQGLGGWTSGVGAEPQWARGRPPAAAPEAAWTQRPDG,;
CCDS2493.1, Del, G_7,
(SEQIDNO: 5663)
SMTAQGTCCTGGRRPPTAASCERLSASSVSMTTSLSTTSG,;
CCDS43896.1, Del, G_7,
(SEQIDNO: 5664)
TPTTSRSSGSLLEVPASLCRPSPPTTRASSGEPSARAAWP,;
CCDS2885.1, Del, G_7,
(SEQIDNO: 5665)
TTFQRAPLKFKLALKRVCRKSVLGALGSMVGLSGGQRTSW,;
CCDS8937.2, Del, G_7,
(SEQIDNO: 5666)
TTVGLLRMAATRTSLPCTPLWLCSPAPWLPKMPPFVSTTP,;
CCDS4442.1, Ins, G_7,
(SEQIDNO: 5667)
GLYCPVYQDSQGTKARRVQQGDQETHGDAQRPGHHHLCQ,;
CCDS33768.1, Ins, G_7,
(SEQIDNO: 5668)
GVPAGHVCPWLQWPVLQRVHGGLWAHRAGPALPPACPLC,;
CCDS47911.1, Ins, G_7,
(SEQIDNO: 5669)
KISPRRRISCCYYKRTDHSAGSKHPYFENVAYSGWDSNI,;
CCDS11607.1, Del, G_7,
(SEQIDNO: 5670)
PPSPPLALGPRMQLCTQLARFFPITPPVWHILGPQRHTP,;
CCDS13874.1, Ins, G_7,
(SEQIDNO: 5671)
PRPAGPIPCAEGLHAVPARGGLLPGPGAHCRCLAHAYAC,;
CCDS3679.1, Ins, G_7,
(SEQIDNO: 5673)
GPGTLRHGRDDPLQGRGRSSEGKDLRRDQSSRRGRRFS,;
CCDS10077.1, Del, G_7,
(SEQIDNO: 5675)
TLQRLTTSGLMGKMEYPSYTPAASSSCSLWQSPRTTER,;
CCDS11420.1, Ins, G_7,
(SEQIDNO: 5676)
VSLPPPPLQRLQGHLGRPYPPCHLLRCGHRPLQCLFLG,;
CCDS11675.1, Del, G_7,
(SEQIDNO: 5677)
YLSAPGWWPPPSHKRFLICTSPSASSLVWDTALVFSQL,;
CCDS33460.1, Ins, G_7,
(SEQIDNO: 5678)
ALKLRGSGLPARRGAGAQDGVHEVQVPPGRRQYILKN,;
CCDS1825.1, Ins, G_7,
(SEQIDNO: 5679)
GPTWWQHLTFDVETDEEPQGWELPFDAGQATERKCTQ,;
CCDS13086.1, Ins, G_7,
(SEQIDNO: 5680)
GRPGRSSADHWHSGVPTRILPPAHRLLCIQRLPWLLL,;
CCDS34710.1, Ins, G_7,
(SEQIDNO: 5681)
GRRCQVQGLAGSLRRVRHGSLCPGIGPSLLGHSKKPQ,;
CCDS41842.1, Ins, G_7,
(SEQIDNO: 5682)
LPCRLGVDRAPHVRKHHPCVPPGDAQLPAHPLLRIPA,;
CCDS55911.1, Del, G_7,
(SEQIDNO: 5683)
PSSAQALAAAACPRGASSPMPLTRQPCMQPATRWSLS,;
CCDS34137.1, Ins, G_7,
(SEQIDNO: 5684)
QEEENPPGSCAGCGLHLGDRAEEEQPSREEWEGPTAG,;
CCDS9636.1, Del, G_7,
(SEQIDNO: 5685)
RRRRGRARAARTGRGARRARRRTASTRSRRSATTRSS,;
CCDS2164.1, Del, G_7,
(SEQIDNO: 5686)
SLQVPQNAAAASWPVRASSVASQKWGPLGQPWLSPIC,;
CCDS7037.2, Del, G_7,
(SEQIDNO: 5687)
TCLPWKGHPIPRHCHGGPVREARSWAFPAWPQRMRSL,;
CCDS31045.1, Del, G_7,
(SEQIDNO: 5688)
AETTLSTAASSSRNSWADGQARICEPVWTSTTTSWV,;
CCDS59246.1, Ins, G_7,
(SEQIDNO: 5689)
AGGMFLACCHHGNGSGCRVCVQGRRVLPQRAQPGPP,;
CCDS30556.1, Del, G_7,
(SEQIDNO: 5690)
CSPWARPRRLASAAGHGPAALCAPGSPQTACSGHWP,;
CCDS2862.1, Ins, G_7,
(SEQIDNO: 5691)
GHCSYKQHSAQHSLQCDFLHCYSQQYSRPSPVLAQQ,;
CCDS6762.1, Ins, G_7,
(SEQIDNO: 5692)
LRLLAGCGGAGNHQGADGHREENWCLYATDALSLLR,;
CCDS8115.1, Ins, G_7,
(SEQIDNO: 5695)
RAQAGAAPRATAAARDPHGAQAARWRFCVGGPGDQS,;
CCDS10511.1, Ins, G_7,
(SEQIDNO: 5697)
GPAPACLLLPYPSQGQVPLARPAPAQAAGVSLGQV,;
CCDS58996.1, Del, G_7,
(SEQIDNO: 5698)
GSCGRACSCGRGCGTPRGDWKRHTRRRSRSRPPRR,;
CCDS31754.1, Del, G_7,
(SEQIDNO: 5699)
KRSSRLGWASGRITYSHSPPRGWCSAAWPPRHGWC,;
CCDS44714.1, Del, G_7,
(SEQIDNO: 5700)
PLGRGSLEGAQSPRECTVLSWSASGLGSLSAANTT,;
CCDS56255.1, Del, G_7,
(SEQIDNO: 5701)
WRPRLHEVQWVVQRLPCRQVQPLWIQPHQEVLPTP,;
CCDS13804.1, Ins, G_7,
(SEQIDNO: 5703)
AEVRAQKVDPLLRGRHSHHLLCGAQRLRPETLRG,;
CCDS2445.1, Ins, G_7,
(SEQIDNO: 5704)
ALWAVWVALAHGCHGPLRHPCQCVDSDAYCHRAW,;
CCDS11417.1, Ins, G_7,
(SEQIDNO: 5705)
GRERGGSGSTWPEPAAARQSEEGASPGAAARQEA,;
CCDS12421.2, Ins, G_7,
(SEQIDNO: 5706)
LSQHPCRLPTSQHDEVVPGLVGEEHAPETHVWQQ,;
CCDS33655.1, Del, G_7,
(SEQIDNO: 5707)
QGPHRPPVALAEDAGLSSRATCYSPLRVARAGPH,;
CCDS11675.1, Ins, G_7,
(SEQIDNO: 5708)
ATCQHRDGGRLLLTRGFSYVRRHRHHLWSGILL,;
CCDS12712.2, Ins, G_7,
(SEQIDNO: 5709)
GHSQCIRRAGIFRGTRFRRHLLRRESNSFLLCF,;
CCDS35277.1, Del, G_7,
(SEQIDNO: 5711)
HPGASPLRGVWNTVSRSQCLRLKMEARQLCPRR,;
CCDS2221.2, Del, G_7,
(SEQIDNO: 5712)
HRLRLQRTCLQEFLLPPPYPPPLFLATPTRAMV,;
CCDS54254.1, Ins, G_7,
(SEQIDNO: 5713)
RAPPRVLVQKWRAKRGGGWSPTPLPHSQLVPPL,;
CCDS7048.1, Ins, G_7,
(SEQIDNO: 5714)
RGPGLPGGAPQRCDRGQSPGQPATGAVGLAAQG,;
CCDS6444.1, Del, G_7,
(SEQIDNO: 5715)
RSRGRRSRLRPHPPAPVPESAALPRAAARSRAS,;
CCDS43090.1, Del, G_7,
(SEQIDNO: 5716)
WRPRLHEWVVQRLPCRQVQPLWIQPHQEVLPTP,;
CCDS59442.1, Ins, G_7,
(SEQIDNO: 5717)
ALQAAAQTLRETDPHIQTGQTASCPFGDMAWV,;
CCDS14240.1, Ins, G_7,
(SEQIDNO: 5718)
ALWRRGRSGVYALPRLAEPAFRHGPGTLPALG,;
CCDS12741.1, Ins, G_7,
(SEQIDNO: 5721)
GPAGHRHLLCPVHLHGLWRAEAREDFCRGKAS,;
CCDS9911.2, Del, G_7,
(SEQIDNO: 5722)
PTPARRTKKQSSATYVSLVSSAISLLVNSWRD,;
CCDS44091.1, Del, G_7,
(SEQIDNO: 5724)
TPLSISRPTSRARQSCCLPGLTHPAHQPLGSM,;
CCDS58829.1, Del, G_7,
(SEQIDNO: 5725)
YPAHSPWCGPSPGSILRIMGAGTPSTPHCGGS,;
CCDS30569.2, Ins, G_7,
(SEQIDNO: 5726)
AAAAAAAGDRCPGGLGCPLRRPQREAAATPC,;
CCDS45171.1, Ins, G_7,
(SEQIDNO: 5727)
APGGGSLGRQQSRLLHQLLAQRGQRLHCRQP,;
CCDS12519.1, Del, G_7,
(SEQIDNO: 5728)
GGLQGHGAQRGGAARPSARSFCPSSSATGGA,;
CCDS12342.1, Ins, G_7,
(SEQIDNO: 5729)
GPFHVDQTQQPVSGCHIQEERVRVAGLFFPL,;
CCDS59399.1, Ins, G_7,
(SEQIDNO: 5730)
GRRWLWWGDGGARPGLLRPVRHVLAAAILQR,;
CCDS53807.1, Ins, G_7,
(SEQIDNO: 5731)
LLQGAEALQSPVHAGGSHAQTHWREATQVHV,;
CCDS46736.1, Ins, G_7,
(SEQIDNO: 5732)
PAPGGGDRGRSPGCPRLPHRNGRQVAPWGGA,;
CCDS10488.1, Del, G_7,
(SEQIDNO: 5734)
PRAPAITWPATQHLPLPSLGGPLSTLPRITS,;
CCDS42296.1, Del, G_7,
(SEQIDNO: 5735)
QATGWRSCWTFSRMSTCPSGERQRKRHLKQE,;
CCDS41570.1, Del, G_7,
(SEQIDNO: 5736)
SCWRCPRSPWTGKAPRRGSRWGRSHRRRLMG,;
CCDS34531.1, Ins, G_7,
(SEQIDNO: 5737)
TGSEARNRSEKDNRGIHVSERLTWKRIFPTC,;
CCDS10056.1, Del, G_7,
(SEQIDNO: 5738)
WRSAWAAPCTTSATCCWSPASPRARPSMPAT,;
CCDS42402.1, Ins, G_7,
(SEQIDNO: 5739)
GSALPNGLGNTGPRGRRALWPSSVLPTLSS,;
CCDS13676.1, Del, G_7,
(SEQIDNO: 5740)
PGPPTPRLEKLSPGPRLGTRGSVSSSWKHL,;
CCDS45666.1, Ins, G_7,
(SEQIDNO: 5741)
PNSVFCLWKTLSGAYKSPTKRGKRERSSLL,;
CCDS3925.1, Del, G_7,
(SEQIDNO: 5742)
RDASAPWAKVVRAAQKILLSSILSSLATPM,;
CCDS8562.1, Del, G_7,
(SEQIDNO: 5743)
RPSPCLSWSSRIVAPGHALSCRTRRRWSSK,;
CCDS8891.1, Del, G_7,
(SEQIDNO: 5744)
SAPAGQPRPWRPSRTAAPCAFGGSTAASCA,;
CCDS13253.2, Del, G_7,
(SEQIDNO: 5745)
SFQMIMGWPLPSGEPSSTGNVKTLDILNCW,;
CCDS43842.1, Del, G_7,
(SEQIDNO: 5746)
TRKASAASCASGVTTSTHRPASAWTSMHQT,;
CCDS30639.1, Del, G_7,
(SEQIDNO: 5747)
VAGTASCLRTGQTRGRRCWRGCCSASSTWA,;
CCDS13316.1, Ins, G_7,
(SEQIDNO: 5748)
VGSGRLWDHAGRARAEPRGAPSNIGWGAKP,;
CCDS41570.1, Ins, G_7,
(SEQIDNO: 5749)
AAAGGARGLRGQERPQGGAPDGAAATAGG,;
CCDS42519.1, Ins, G_7,
(SEQIDNO: 5751)
ASEHQVMDLHQQDGRARGQCTHGQDPLLG,;
CCDS11417.1, Ins, G_7,
(SEQIDNO: 5752)
GSGSTWPEPAAARQSEEGASPGAAARQEA,;
CCDS33768.1, Ins, G_7,
(SEQIDNO: 5753)
GVLRPWAVPGQVPGQRGVPLPRGLPWNGL,;
CCDS956.1, Del, G_7,
(SEQIDNO: 5754)
PAWGPAAAAPPAREGDFWLRRRRPRPGER,;
CCDS45666.1, Del, G_7,
(SEQIDNO: 5755)
QLSLLLMENSIGGLQESHQEGEEGEEFLT,;
CCDS42230.1, Del, G_7,
(SEQIDNO: 5756)
SPASPAPTARASSTSPRASLLWLASRPSS,;
CCDS53798.1, Ins, G_7,
(SEQIDNO: 5758)
SWPPALWAPAGTGTASQGLPVPLLDPVHQ,;
CCDS8776.1, Del, G_7,
(SEQIDNO: 5759)
AATTLTSAASSAGSSWTPGRRGGTCASS,;
CCDS12673.1, Ins, G_7,
(SEQIDNO: 5761)
GGGGGGGGDRRGGGGSAPALADFAGGRG,;
CCDS920.2, Ins, G_7,
(SEQIDNO: 5762)
GLEGGAWRTPALRSLFDWLSVRHHFPGL,;
CCDS31898.1, Ins, G_7,
(SEQIDNO: 5763)
GSGHREGAYCQQRDCRREVHALHPQVGL,;
CCDS4711.1, Del, G_7,
(SEQIDNO: 5764)
GSQEWGWDPGVRAVPIPSPLSSRGTRKD,;
CCDS7694.1, Ins, G_7,
(SEQIDNO: 5765)
GWEAATELHPSDTPMAGGVQGAGEPARV,;
CCDS12444.1, Ins, G_7,
(SEQIDNO: 5766)
LTAVGPAQSRPAPGPNADPGPAAAAAAQ,;
CCDS13804.1, Del, G_7,
(SEQIDNO: 5767)
RGQSAKSGSTASRASQPSSSVWSSAATT,;
CCDS12915.1, Ins, G_7,
(SEQIDNO: 5768)
AGVREQCAAAASDIGCRGAAAGQRHST,;
CCDS14409.1, Del, G_7,
(SEQIDNO: 5769)
CSIKPPLPRRWTTVLREPWHGMQEIRP,;
CCDS13160.1, Ins, G_7,
(SEQIDNO: 5770)
GELLLRRRGGPHHMYQVPAQLGHLCLP,;
CCDS41561.1, Ins, G_7,
(SEQIDNO: 5772)
GVCERPAPTRRGEAAHRGAGPPGCAAL,;
CCDS12927.1, Del, G_7,
(SEQIDNO: 5773)
LEPLGRPCPAPPAAASSVSPTTSPGTG,;
CCDS46200.1, Ins, G_7,
(SEQIDNO: 5774)
PSTHGCCRPHGCPHLGPLGRPPCPSSC,;
CCDS12793.1, Ins, G_7,
(SEQIDNO: 5775)
SGWAGDHGAASSASPRRALPVGSGGGD,;
CCDS31948.1, Del, G_7,
(SEQIDNO: 5776)
SLSSCGWAPFSVGLHMGFSTPATSLHP,;
CCDS2420.1, Del, G_7,
(SEQIDNO: 5777)
SLTLRLSETDTSSAFSSLLPLRNLSQL,;
CCDS9338.1, Del, G_7,
(SEQIDNO: 5778)
STSSVTASCASTGSSTASAATSRGMWN,;
CCDS2891.1, Del, G_7,
(SEQIDNO: 5779)
TSPQLETLKAITLLIEMDLFSDMSSTS,;
CCDS11129.1, Ins, G_7,
(SEQIDNO: 5780)
ALCQGHVPGRGRLCWGDGTGSVGAHL,;
CCDS45937.1, Ins, G_7,
(SEQIDNO: 5781)
ATEHGPGGRLPLPVAGQRHQRAQDCS,;
CCDS3846.1, Del, G_7,
(SEQIDNO: 5783)
FCPLGCCVHPPPPSALLAMKLLTAAT,;
CCDS45604.1, Ins, G_7,
(SEQIDNO: 5784)
GCGAGTARRGARLQRGLLQGLCEGCP,;
CCDS7030.1, Del, G_7,
(SEQIDNO: 5786)
ISEPPATSSSPTGTWTPGQGAGFGGT,;
CCDS43015.1, Del, G_7,
(SEQIDNO: 5787)
LPGSTRRAGGSQRPGRRSPLMSSPEN,;
CCDS30670.1, Ins, G_7,
(SEQIDNO: 5788)
LPHRWQGWGDPLPQDAERQLHQSHGG,;
CCDS48016.1, Del, G_7,
(SEQIDNO: 5789)
LPRSTACLSLSSPSFCPLSPAPPVTL,;
CCDS45638.1, Del, G_7,
(SEQIDNO: 5790)
LTHCPWPTSLSCCGAKSSAAPPTKRP,;
CCDS47911.1, Del, G_7,
(SEQIDNO: 5791)
NLPQKKDLLLLLQKDRPFCWIKAPLF,;
CCDS45072.1, Ins, G_7,
(SEQIDNO: 5792)
PALRQRCQRMQPGERGLPPDLPQQAG,;
CCDS59086.1, Ins, G_7,
(SEQIDNO: 5793)
PGPHTHLGILLYLSPFCSTCPEDQLP,;
CCDS33764.1, Del, G_7,
(SEQIDNO: 5794)
PRAETAQACSTPSHPATFPSSTSSQH,;
CCDS33655.1, Ins, G_7,
(SEQIDNO: 5795)
PRDPTDPQWHWPKMLVCPQGQPAILL,;
CCDS12698.1, Del, G_7,
(SEQIDNO: 5797)
PTSSGCAVALSTSGRAAELAWAVLET,;
CCDS834.1, Del, G_7,
(SEQIDNO: 5798)
PWCGHWTWMTSGARSVALALSPLSTY,;
CCDS4080.1, Del, G_7,
(SEQIDNO: 5799)
QGACGRSSAMGCRADGWGRTTSPYCM,;
CCDS5332.1, Del, G_7,
(SEQIDNO: 5800)
RNSSKFRDSATKGFSLLTSHLVKGTW,;
CCDS7940.1, Del, G_7,
(SEQIDNO: 5801)
RRMIWTSLPNLPDSSSALTQRQTNAM,;
CCDS55698.1, Del, G_7,
(SEQIDNO: 5802)
SRPELMPHTFSKSPSTSGICSPTWST,;
CCDS12712.2, Del, G_7,
(SEQIDNO: 5803)
TFPVYQKSRNLQRDKIQETFAQKRIK,;
CCDS325.1, Ins, G_7,
(SEQIDNO: 5804)
CPAHPQDPNPQVPQQEAALRPMPVL,;
CCDS55596.1, Ins, G_7,
(SEQIDNO: 5805)
DAGARLQGCAPSLPAALPRGRHPLL,;
CCDS5689.1, Ins, G_7,
(SEQIDNO: 5807)
GIYWFSHPNHPHSLPLSPGPAWTSI,;
CCDS31785.1, Ins, G_7,
(SEQIDNO: 5808)
GRATCGAPRHARHYPAATGGRGLPV,;
CCDS7916.1, Ins, G_7,
(SEQIDNO: 5809)
GRVPARRLPVPGAAHRFASQFQAHP,;
CCDS12793.1, Del, G_7,
(SEQIDNO: 5811)
RVGWGSWGCLLCQPPASLARWLRRR,;
CCDS5194.1, Del, G_7,
(SEQIDNO: 5812)
TSTPPCSSFGGWTSPNSSLTSPGIS,;
CCDS14729.1, Ins, G_7,
(SEQIDNO: 5813)
WATDPCQGHRPRRGAAAPTVCVAGG,;
CCDS31598.1, Del, G_7,
(SEQIDNO: 5814)
AWASYTTSRRATPCAPSPAATAKP,;
CCDS44155.1, Ins, G_7,
(SEQIDNO: 5815)
GDVCGNAGPETSVAERELERDLLG,;
CCDS1089.1, Ins, G_7,
(SEQIDNO: 5817)
GHSQPPLSLAITAASDSSSSANSV,;
CCDS32006.1, Ins, G_7,
(SEQIDNO: 5818)
GRAGGEEQASHSALELVGFLPFVL,;
CCDS58996.1, Ins, G_7,
(SEQIDNO: 5819)
GVQVHWARRQWPQGQWQVEPKVMH,;
CCDS5689.1, Del, G_7,
(SEQIDNO: 5820)
HLLVFTPKPSSFSPSQPWPCLDLD,;
CCDS44442.1, Ins, G_7,
(SEQIDNO: 5821)
LCHLRVWRQPHQPLLGDQRHTLLH,;
CCDS6578.1, Del, G_7,
(SEQIDNO: 5822)
RHPPGSTRYPSFPLRLVPLSLIGP,;
CCDS44647.1, Del, G_7,
(SEQIDNO: 5823)
RPASGAQAGAGRWPASASRWSLRR,;
CCDS9830.1, Ins, G_7,
(SEQIDNO: 5824)
RRATSAVPPAVPGDLPLNLLCLEA,;
CCDS2442.1, Del, G_7,
(SEQIDNO: 5825)
SAVCSPITTTPTVPQEVSLKILLA,;
CCDS325.1, Del, G_7,
(SEQIDNO: 5826)
SGSSTRPKSPGPPAGSSTQAHASV,;
CCDS31785.1, Del, G_7,
(SEQIDNO: 5827)
TGHLWSPSTCPTLPCCNWRARPPC,;
CCDS5194.1, Ins, G_7,
(SEQIDNO: 5828)
TLRHPRAVPSAAGPLRTPHSHPQA,;
CCDS9548.1, Del, G_7,
(SEQIDNO: 5829)
WQLAGPMLAGWRSLGSWFCRMYGI,;
CCDS33606.1, Ins, G_7,
(SEQIDNO: 5830)
ADRGCGPGRRRAVQGSPERGLRP,;
CCDS14350.1, Ins, G_7,
(SEQIDNO: 5831)
EPGNRFSGCTVEQFWWRGGPRNL,;
CCDS34219.1, Ins, G_7,
(SEQIDNO: 5832)
GQWEREAGQPQCQRTKDTPKLCC,;
CCDS53798.1, Del, G_7,
(SEQIDNO: 5833)
LAACSLGPCWYWNCIPRAPCATT,;
CCDS59157.1, Del, G_7,
(SEQIDNO: 5834)
LAPAPVRTPRVLGEQVQGAPSPW,;
CCDS4748.1, Ins, G_7,
(SEQIDNO: 5835)
PGIGEWGAWGPWRASRWRRPRWG,;
CCDS34420.1, Ins, G_7,
(SEQIDNO: 5837)
RGLFSLPEPLGSRSRRRPDPSRP,;
CCDS10750.1, Del, G_7,
(SEQIDNO: 5838)
RRRTRGARAWLTTTRTRRSIWRT,;
CCDS2445.1, Del, G_7,
(SEQIDNO: 5839)
SVGCLGCPGSRLPRSAPSPMSMR,;
CCDS10488.1, Ins, G_7,
(SEQIDNO: 5840)
VPGPQPLHGPLLNICPCHLSGAL,;
CCDS14076.1, Ins, G_7,
(SEQIDNO: 5841)
DAHQRRHPEHEQRTQGQGEGRL,;
CCDS54978.1, Ins, G_7,
(SEQIDNO: 5842)
GEFLIPQYRQPRLQAGRTGNKE,;
CCDS44618.1, Ins, G_7,
(SEQIDNO: 5843)
GLGGGDRACRLRVCQHTGPAGV,;
CCDS55911.1, Ins, G_7,
(SEQIDNO: 5844)
GLLQPKPWQQQPVLVELLLRCL,;
CCDS30901.1, Ins, G_7,
(SEQIDNO: 5845)
GPGYLLCGLCCPDVLFCLMGLY,;
CCDS9277.1, Ins, G_7,
(SEQIDNO: 5846)
GPQPLGLERAVHLDSQTQPGVP,;
CCDS3066.1, Del, G_7,
(SEQIDNO: 5847)
LWDPTNGSTLADEKMRLHGQSM,;
CCDS12326.1, Del, G_7,
(SEQIDNO: 5848)
LWSQCQLKRMRQMTHQLASSPT,;
CCDS54060.1, Del, G_7,
(SEQIDNO: 5849)
MASPRLHLRDWLLGWKQGKAWR,;
CCDS53360.1, Ins, G_7,
(SEQIDNO: 5850)
PGPEFQHCPPEGGARDGVCPGK,;
CCDS46932.1, Del, G_7,
(SEQIDNO: 5851)
PSFPLLFLASWLTSCYFFLEEK,;
CCDS43361.1, Del, G_7,
(SEQIDNO: 5852)
RPPSPLSRPGSGPPTHRFQPLS,;
CCDS3607.1, Del, G_7,
(SEQIDNO: 5853)
SHPSAAPRSSSRPPPHTASTIS,;
CCDS11662.1, Del, G_7,
(SEQIDNO: 5854)
TAGTPAPPPVPTCSPRTLRCLP,;
CCDS10047.2, Ins, G_7,
(SEQIDNO: 5855)
WRRRLGRWWGRGRRVGGRRRRW,;
CCDS43361.1, Ins, G_7,
(SEQIDNO: 5856)
AGLRARSAARGAVRRPTASSP,;
CCDS33460.1, Del, G_7,
(SEQIDNO: 5857)
AQAARIRAARETRSGRPGWGA,;
CCDS1001.1, Ins, G_7,
(SEQIDNO: 5858)
GGRSGRGAQGGPHPGGEPREC,;
CCDS41237.1, Ins, G_7,
(SEQIDNO: 5859)
GPLPRGHGAVPVSAGEDWGRL,;
CCDS47741.1, Ins, G_7,
(SEQIDNO: 5861)
GWSNSCNVSRLHFRFEAKRNH,;
CCDS43015.1, Ins, G_7,
(SEQIDNO: 5862)
HFQGVQGELGAARGLGGEAHS,;
CCDS53948.1, Del, G_7,
(SEQIDNO: 5863)
HPNLSTPTSHTLILRLTCCPP,;
CCDS1924.1, Ins, G_7,
(SEQIDNO: 5864)
LLLPLQDSGGPGARRAGGDHL,;
CCDS45604.1, Del, G_7,
(SEQIDNO: 5865)
MWSRDCPSRCAAPTGPSTRAL,;
CCDS6025.1, Ins, G_7,
(SEQIDNO: 5866)
PGAGAAGALRARLLPHAASQR,;
CCDS862.1, Del, G_7,
(SEQIDNO: 5867)
RSGHLNVCLWVKWLRRSERCA,;
CCDS32172.1, Del, G_7,
(SEQIDNO: 5868)
SFILSYRWLSLFDFLSVGPMS,;
CCDS53264.1, Del, G_7,
(SEQIDNO: 5869)
TQGPCSCCPGYRPRASPAARS,;
CCDS5848.1, Del, G_7,
(SEQIDNO: 5870)
TQGRARAPATATCLHPLTIGP,;
CCDS10904.1, Ins, G_7,
(SEQIDNO: 5871)
VHPGLVLLLPLPLCCLWLSCV,;
CCDS10864.1, Del, G_7,
(SEQIDNO: 5872)
WPRPCASWLQETTTGSQSSGP,;
CCDS42253.1, Del, G_7,
(SEQIDNO: 5873)
WSEKPSQMQMTLAYSSRWTWM,;
CCDS7296.1, Ins, G_7,
(SEQIDNO: 5874)
EEIQGCQTTDVQKVQTKGQR,;
CCDS44474.1, Ins, G_7,
(SEQIDNO: 5875)
GAAGERTDPGQAAGVRAEHQ,;
CCDS13316.1, Del, G_7,
(SEQIDNO: 5876)
GEWAALGPCWKSACRASRSA,;
CCDS4328.1, Ins, G_7,
(SEQIDNO: 5877)
GPHRQPHLACQDERRTGQGH,;
CCDS11091.1, Ins, G_7,
(SEQIDNO: 5878)
GRAHGEARGAGPRVQVRQWQ,;
CCDS34424.1, Ins, G_7,
(SEQIDNO: 5879)
GRRARGGRRGWRRCELRLRP,;
CCDS32172.1, Ins, G_7,
(SEQIDNO: 5880)
LHSFYHTGGSHCSTSFLWAQ,;
CCDS30852.1, Del, G_7,
(SEQIDNO: 5881)
LLTGPAWSLTLSTRAPGCPC,;
CCDS5873.2, Del, G_7,
(SEQIDNO: 5882)
PPWWQLWAPVWLMQSQRRME,;
CCDS4442.1, Del, G_7,
(SEQIDNO: 5883)
SVLPSLSRFPGNQSQESSAR,;
CCDS10953.1, Del, G_7,
(SEQIDNO: 5884)
TWGLLTLVYPWKCPCGWRLT,;
CCDS9472.1, Ins, G_7,
(SEQIDNO: 5885)
AAAAGCGPHVLLVAAGQPG,;
CCDS11592.1, Ins, G_7,
(SEQIDNO: 5886)
ALAPRRERAPCERQRLPQS,;
CCDS14350.1, Del, G_7,
(SEQIDNO: 5887)
AWKSIFRLYSRAVLVERGP,;
CCDS8954.1, Del, G_7,
(SEQIDNO: 5888)
CRGYTSCRCRAPRTSGRCG,;
CCDS6578.1, Ins, G_7,
(SEQIDNO: 5890)
GDIPRGLPGIHLFPSGWYL,;
CCDS9889.1, Ins, G_7,
(SEQIDNO: 5891)
GGSLCNHEQQVGRDQWGQV,;
CCDS7037.2, Ins, G_7,
(SEQIDNO: 5892)
GHACLGRGTPYPATATAAP,;
CCDS2442.1, Ins, G_7,
(SEQIDNO: 5893)
GQQSAPQSPPPPRSPRRSL,;
CCDS44195.1, Del, G_7,
(SEQIDNO: 5894)
HVNPKERKASPRSWAAGSP,;
CCDS7644.1, Ins, G_7,
(SEQIDNO: 5895)
PAAPGAVQQLQPPKRTAPW,;
CCDS37.1, Del, G_7,
(SEQIDNO: 5896)
TSSSPAWTPPRPSRSSVRK,;
CCDS41741.1, Ins, G_7,
(SEQIDNO: 5897)
AEAGAQGCRRGGHLPVGE,;
CCDS12519.1, Del, G_7,
(SEQIDNO: 5898)
ARPSARSFCPSSSATGGA,;
CCDS32069.1, Ins, G_7,
(SEQIDNO: 5899)
CFYYQSWPQSSILYTTLC,;
CCDS1719.1, Ins, G_7,
(SEQIDNO: 5900)
ECQDHHGSHTGASFSQLR,;
CCDS13075.1, Del, G_7,
(SEQIDNO: 5901)
GGMRMSSGRWWWSARTVS,;
CCDS31829.1, Ins, G_7,
(SEQIDNO: 5902)
GLPHQVPENATAHHEPDL,;
CCDS9911.2, Ins, G_7,
(SEQIDNO: 5903)
IPHLPEGRKSNRVQLMSV,;
CCDS13149.1, Del, G_7,
(SEQIDNO: 5904)
MAPSSAAADQDSGCWMTW,;
CCDS33646.1, Del, G_7,
(SEQIDNO: 5905)
MFVLNPCLPSIMLTSHNM,;
CCDS3702.1, Del, G_7,
(SEQIDNO: 5906)
RAPQKKVRSISLTFTEIP,;
CCDS48016.1, Ins, G_7,
(SEQIDNO: 5907)
RCQGAQPAFLCPPPLSAP,;
CCDS12604.2, Del, G_7,
(SEQIDNO: 5908)
RMGVAAAWRVDSAAPVMG,;
CCDS45376.1, Del, G_7,
(SEQIDNO: 5909)
TLQPRGSAGARPPAGLST,;
CCDS42817.1, Del, G_7,
(SEQIDNO: 5910)
VAGEENEGPPRPSLMCPR,;
CCDS41865.1, Ins, G_7,
(SEQIDNO: 5911)
VREEEGAEGPAFPAKVAG,;
CCDS41243.1, Ins, G_7,
(SEQIDNO: 5912)
VVLPTPHRPDQGGGSGRR,;
CCDS7029.1, Ins, G_7,
(SEQIDNO: 5913)
APECLPPVWGQPLPEES,;
CCDS1924.1, Del, G_7,
(SEQIDNO: 5914)
APSSPRLGWSRSTAGGR,;
CCDS7163.1, Ins, G_7,
(SEQIDNO: 5915)
DGGALGEAGRGRRKCAK,;
CCDS12804.1, Ins, G_7,
(SEQIDNO: 5916)
DWCCAPDSVPDCGRLGV,;
CCDS55440.1, Del, G_7,
(SEQIDNO: 5917)
FLPPVSWPRASACVPSP,;
CCDS9769.1, Del, G_7,
(SEQIDNO: 5918)
FWINLASRVISTTPATA,;
CCDS37.1, Ins, G_7,
(SEQIDNO: 5919)
GHLHHQRGRRHDLRGAL,;
CCDS5848.1, Ins, G_7,
(SEQIDNO: 5920)
GLRGEPEPLLLPHVCTL,;
CCDS12645.1, Del, G_7,
(SEQIDNO: 5921)
HCWCCCFWLGGPWPSSC,;
CCDS32169.1, Ins, G_7,
(SEQIDNO: 5922)
LPAPSQAAADELDRRPG,;
CCDS44037.2, Del, G_7,
(SEQIDNO: 5923)
LSPPDRLGLWLPRGPAT,;
CCDS32830.1, Del, G_7,
(SEQIDNO: 5924)
LWDPSRRRTTTVPISTS,;
CCDS3846.1, Ins, G_7,
(SEQIDNO: 5925)
PFALWDAVCILHHQVHC,;
CCDS13254.1, Del, G_7,
(SEQIDNO: 5926)
PPMPMPGQREAPGRQEA,;
CCDS43789.1, Del, G_7,
(SEQIDNO: 5927)
QLRLMLPSSARPWGPDG,;
CCDS11139.1, Ins, G_7,
(SEQIDNO: 5928)
RALCLAPPLHPSLPAAL,;
CCDS5332.1, Ins, G_7,
(SEQIDNO: 5929)
REIQANSEIQPPRGSAY,;
CCDS58996.1, Del, G_7,
(SEQIDNO: 5930)
RPSPLGPPSMASRSVAG,;
CCDS34137.1, Del, G_7,
(SEQIDNO: 5931)
RRGKPTRVLCWMWAASG,;
CCDS13048.1, Ins, G_7,
(SEQIDNO: 5932)
APVRQAPYDFASYPIF,;
CCDS33367.1, Ins, G_7,
(SEQIDNO: 5933)
CRCQSRLFETGHRFVL,;
CCDS45376.1, Ins, G_7,
(SEQIDNO: 5934)
GPCSQGGALGPGLLPG,;
CCDS53970.1, Ins, G_7,
(SEQIDNO: 5935)
GRLPLPPGTHPLLADL,;
CCDS58829.1, Ins, G_7,
(SEQIDNO: 5936)
GTQHIHHGVDHRQDPF,;
CCDS13149.1, Ins, G_7,
(SEQIDNO: 5937)
GWLLPLRLPTRIPAAG,;
CCDS22.1, Del, G_7,
(SEQIDNO: 5938)
HPGDPLSGSWLPSPRN,;
CCDS31898.1, Del, G_7,
(SEQIDNO: 5939)
IGSSRRCLLPTTGLPP,;
CCDS42175.1, Del, G_7,
(SEQIDNO: 5940)
MARPGWPWPQTSVTSA,;
CCDS12604.2, Ins, G_7,
(SEQIDNO: 5941)
PGWGWPLHGGWTQRPP,;
CCDS4748.1, Del, G_7,
(SEQIDNO: 5942)
SREAEGSKTSGTFCSR,;
CCDS5780.1, Del, G_7,
(SEQIDNO: 5943)
APMMSSMACGSAESS,;
CCDS8146.1, Ins, G_7,
(SEQIDNO: 5944)
AWHRAGGGALPTADP,;
CCDS3819.1, Del, G_7,
(SEQIDNO: 5945)
CRRAPGPRAWGGRAR,;
CCDS3066.1, Ins, G_7,
(SEQIDNO: 5946)
GCGTPQTAAPWPTRR,;
CCDS12418.2, Ins, G_7,
(SEQIDNO: 5947)
GCRGAVRCLDDKWTV,;
CCDS2164.1, Ins, G_7,
(SEQIDNO: 5948)
GLCKCPRMPLQPPGP,;
CCDS13064.1, Ins, G_7,
(SEQIDNO: 5949)
GRRGIGGGRGGGGGG,;
CCDS13438.1, Ins, G_7,
(SEQIDNO: 5950)
GSYPPGFLGGHLRCE,;
CCDS59423.1, Ins, G_7,
(SEQIDNO: 5951)
HQGRPRHPGGAAPDT,;
CCDS44442.1, Del, G_7,
(SEQIDNO: 5952)
LSPTCVEAASSALAG,;
CCDS46831.1, Del, G_7,
(SEQIDNO: 5953)
MSWMSRASRKTLRKS,;
CCDS55562.1, Del, G_7,
(SEQIDNO: 5954)
PPSTSPPRGWGLQVE,;
CCDS1947.1, Del, G_7,
(SEQIDNO: 5955)
RLQCLGPRVWAAPEA,;
CCDS1001.1, Del, G_7,
(SEQIDNO: 5956)
RPIGPGCARGTASWR,;
CCDS11129.1, Del, G_7,
(SEQIDNO: 5957)
SLPRACPWAWKALLG,;
CCDS6762.1, Del, G_7,
(SEQIDNO: 5958)
SPTCRMWWSRQSSGC,;
CCDS53455.1, Del, G_7,
(SEQIDNO: 5959)
WHLREVGTHFWEAEG,;
CCDS11327.1, Del, G_7,
(SEQIDNO: 5960)
WQAVGACPSMGSLGG,;
CCDS12933.1, Ins, G_7,
(SEQIDNO: 5961)
ADPGPWQPSVGCAD,;
CCDS9196.1, Ins, G_7,
(SEQIDNO: 5962)
AVGEHHGGGREAIF,;
CCDS42296.1, Ins, G_7,
(SEQIDNO: 5963)
DRQRAGDHAGHSAG,;
CCDS3936.1, Ins, G_7,
(SEQIDNO: 5964)
ELFQCTNFLFLKEK,;
CCDS31576.1, Ins, G_7,
(SEQIDNO: 5965)
GFIEIHWTGVNHLSQW,;
CCDS2891.1, Ins, G_7,
(SEQIDNO: 5966)
GLPHSSRPSRQLLY,;
CCDS8115.1, Del, G_7,
(SEQIDNO: 5967)
GTGRSCSESYSGCT,;
CCDS10359.1, Del, G_7,
(SEQIDNO: 5968)
LSSGSPSSAKTSHA,;
CCDS33606.1, Del, G_7,
(SEQIDNO: 5969)
RSGLRPWQAARGPR,;
CCDS33469.1, Ins, G_7,
(SEQIDNO: 5970)
SVWLPLGLPAGHCQ,;
CCDS1089.1, Del, G_7,
(SEQIDNO: 5971)
TLPAPSVSCYYCCF,;
CCDS42817.1, Ins, G_7,
(SEQIDNO: 5972)
TWRGRKTRDPPDPA,;
CCDS48074.1, Ins, G_7,
(SEQIDNO: 5973)
AVCGFSLWCWRAV,;
CCDS5911.1, Ins, G_7,
(SEQIDNO: 5974)
AVGGEPVQWPLQP,;
CCDS11065.1, Ins, G_7,
(SEQIDNO: 5975)
ELTHSHDCSPEPC,;
CCDS13438.1, Del, G_7,
(SEQIDNO: 5976)
FLPSRFPWGPPPL,;
CCDS42175.1, Ins, G_7,
(SEQIDNO: 5977)
GWRGRAGPGPKRV,;
CCDS34424.1, Del, G_7,
(SEQIDNO: 5978)
KESPGREKGMEKM,;
CCDS5313.1, Ins, G_7,
(SEQIDNO: 5979)
PFLQPGPELLHTP,;
CCDS53455.1, Del, G_7,
(SEQIDNO: 5980)
PLKGLGRLLGSST,;
CCDS14699.1, Ins, G_7,
(SEQIDNO: 5981)
QDHSPAREHPLPP,;
CCDS53970.1, Del, G_7,
(SEQIDNO: 5982)
SSSTTARDPPATR,;
CCDS34710.1, Del, G_7,
(SEQIDNO: 5983)
TQMPGPRPCWESA,;
CCDS10670.1, Del, G_7,
(SEQIDNO: 5984)
WPPSASPRPHSSP,;
CCDS13742.1, Ins, G_7,
(SEQIDNO: 5985)
AAGAEHQGGAGQ,;
CCDS11069.2, Del, G_7,
(SEQIDNO: 5986)
ANQSWSLLRTMR,;
CCDS1942.2, Ins, G_7,
(SEQIDNO: 5987)
ARGSWIPPFGYV,;
CCDS41590.1, Ins, G_7,
(SEQIDNO: 5988)
ASRVPEAGQVPG,;
CCDS42992.1, Ins, G_7,
(SEQIDNO: 5989)
AVGGGAWGDPRL,;
CCDS42512.1, Del, G_7,
(SEQIDNO: 5990)
CSRLTGCWGQPS,;
CCDS46932.1, Ins, G_7,
(SEQIDNO: 5991)
DPHSPCFFWLPG,;
CCDS8562.1, Ins, G_7,
(SEQIDNO: 5992)
EDPLRVSAGAPG,;
CCDS8839.1, Ins, G_7,
(SEQIDNO: 5993)
GHQGWIQHKCGL,;
CCDS2870.1, Ins, G_7,
(SEQIDNO: 5994)
GPDVPHPGQRPL,;
CCDS918.1, Ins, G_7,
(SEQIDNO: 5995)
GPQCPMCQGPLR,;
CCDS53948.1, Ins, G_7,
(SEQIDNO: 5996)
GTPTSQPPQVTP,;
CCDS12421.2, Del, G_7,
(SEQIDNO: 5997)
IPASMPPTNFPT,;
CCDS8146.1, Del, G_7,
(SEQIDNO: 5998)
LAPCRGWCASYS,;
CCDS4216.1, Del, G_7,
(SEQIDNO: 5999)
MRMMMRRTRTSC,;
CCDS5379.1, Ins, G_7,
(SEQIDNO: 6000)
QQRSRKAIFQFF,;
CCDS12287.1, Del, G_7,
(SEQIDNO: 6001)
RLRSWGRRRGAS,;
CCDS59423.1, Del, G_7,
(SEQIDNO: 6002)
SGPPTPSWGGCT,;
CCDS4337.1, Del, G_7,
(SEQIDNO: 6003)
VTHPLYCLIVGN,;
CCDS59086.1, Del, G_7,
(SEQIDNO: 6004)
WASHSSRDSSVP,;
CCDS7048.1, Del, G_7,
(SEQIDNO: 6005)
WPRASRWCTSTL,;
CCDS32498.1, Ins, G_7,
(SEQIDNO: 6006)
AAQLLWALGGC,;
CCDS44729.1, Ins, G_7,
(SEQIDNO: 6007)
AHFKRRVSIQL,;
CCDS6434.1, Ins, G_7,
(SEQIDNO: 6008)
APCTTPPAWRS,;
CCDS45371.1, Ins, G_7,
(SEQIDNO: 6009)
APHEAHYLHLQ,;
CCDS720.1, Ins, G_7,
(SEQIDNO: 6010)
AQYLLRSKKED,;
CCDS10055.2, Ins, G_7,
(SEQIDNO: 6011)
DGCDHTSTPPA,;
CCDS10750.1, Ins, G_7,
(SEQIDNO: 6012)
GGGGHGGRGPG,;
CCDS34420.1, Del, G_7,
(SEQIDNO: 6013)
GPILIAGASRE,;
CCDS32996.1, Ins, G_7,
(SEQIDNO: 6014)
GPLAAETQASC,;
CCDS58850.1, Ins, G_7,
(SEQIDNO: 6015)
GVRGCRGRQDL,;
CCDS736.1, Ins, G_7,
(SEQIDNO: 6016)
HDCLANCHLLS,;
CCDS8031.1, Ins, G_7,
(SEQIDNO: 6017)
HLAPTPLLFAG,;
CCDS3925.1, Ins, G_7,
(SEQIDNO: 6018)
LAMPVHPGQRW,;
CCDS4711.1, Ins, G_7,
(SEQIDNO: 6019)
LGARNGAGTPG,;
CCDS59442.1, Del, G_7,
(SEQIDNO: 6020)
PAGSGSDTQRD,;
CCDS11417.1, Del, G_7,
(SEQIDNO: 6021)
PGAGGIRLDLA,;
CCDS6097.2, Del, G_7,
(SEQIDNO: 6022)
PPSAPMPSTSQ,;
CCDS1942.2, Del, G_7,
(SEQIDNO: 6023)
PRVLDPPFWLR,;
CCDS11069.2, Ins, G_7,
(SEQIDNO: 6024)
QPTRAGHSSGP,;
CCDS12915.1, Del, G_7,
(SEQIDNO: 6025)
RSSRAVCGGRI,;
CCDS33679.1, Del, G_7,
(SEQIDNO: 6026)
SSSKCTLAALR,;
CCDS4328.1, Del, G_7,
(SEQIDNO: 6027)
TAQATTPRVPR,;
CCDS45572.1, Del, G_7,
(SEQIDNO: 6028)
TWRPTWRPPTT,;
CCDS41781.2, Del, G_7,
(SEQIDNO: 6029)
YGGQWPWAQTA,;
CCDS56184.1, Ins, G_7,
(SEQIDNO: 6030)
ALSDMPGSLP,;
CCDS10389.1, Ins, G_7,
(SEQIDNO: 6031)
EEPLHRVCGR,;
CCDS12131.1, Ins, G_7,
(SEQIDNO: 6032)
GGQDCAPRAL,;
CCDS44438.1, Ins, G_7,
(SEQIDNO: 6033)
GRAEETVTGV,;
CCDS12421.2, Del, G_7,
(SEQIDNO: 6034)
LISSNPWKTQ,;
CCDS11486.1, Ins, G_7,
(SEQIDNO: 6035)
LTPAGRPRSP,;
CCDS6402.1, Ins, G_7,
(SEQIDNO: 6036)
PASCPAAACP,;
CCDS11086.1, Del, G_7,
(SEQIDNO: 6037)
PCWPRLWPMG,;
CCDS42253.1, Ins, G_7,
(SEQIDNO: 6038)
PGPRSPHRCR,;
CCDS6876.1, Ins, G_7,
(SEQIDNO: 6039)
PLLRGSALQP,;
CCDS10746.1, Del, G_7,
(SEQIDNO: 6040)
PQRPLQICTC,;
CCDS12698.1, Ins, G_7,
(SEQIDNO: 6041)
PRLRAGALWP,;
CCDS918.1, Del, G_7,
(SEQIDNO: 6042)
PTMPHVPRAT,;
CCDS7494.1, Ins, G_7,
(SEQIDNO: 6043)
RCAQTREKTL,;
CCDS3506.1, Del, G_7,
(SEQIDNO: 6046)
CQYLRCGVK,;
CCDS14350.1, Ins, G_7,
(SEQIDNO: 6047)
DPRILHARC,;
CCDS30852.1, Ins, G_7,
(SEQIDNO: 6048)
DSSRAPPGA,;
CCDS5708.1, Del, G_7,
(SEQIDNO: 6049)
FALEAWTPR,;
CCDS44752.1, Del, G_7,
(SEQIDNO: 6050)
FSLPTTELC,;
CCDS55799.1, Del, G_7,
(SEQIDNO: 6051)
FWLSLLYWP,;
CCDS32871.1, Ins, G_7,
(SEQIDNO: 6053)
GCHSGGSAQ,;
CCDS56144.1, Ins, G_7,
(SEQIDNO: 6054)
GCQDCEIHV,;
CCDS3324.1, Del, G_7,
(SEQIDNO: 6057)
LRTGPCAKP,;
CCDS7494.1, Del, G_7,
(SEQIDNO: 6058)
LRTNPGENP,;
CCDS32169.1, Del, G_7,
(SEQIDNO: 6059)
PCPQSSGGG,;
CCDS34238.1, Del, G_7,
(SEQIDNO: 6060)
PQWCGWVRY,;
CCDS12131.1, Del, G_7,
(SEQIDNO: 6061)
RTGLRPPCP,;
CCDS13874.1, Del, G_7,
(SEQIDNO: 6063)
TASRTYSVC,;
CCDS1825.1, Del, G_7,
(SEQIDNO: 6064)
THLVAAPHI,;
CCDS3679.1, Del, G_7,
(SEQIDNO: 6065)
TRNSAPRTR,;
CCDS14199.1, Ins, G_7,
(SEQIDNO: 6066)
AQGTGGGD,;
CCDS780.2, Ins, G_7,
(SEQIDNO: 6067)
AWFIWGQR,;
CCDS12398.1, Ins, G_7,
(SEQIDNO: 6068)
DRECRGRR,;
CCDS9376.1, Del, G_7,
(SEQIDNO: 6069)
ETLLLELS,;
CCDS2832.1, Del, G_7,
(SEQIDNO: 6070)
GGSPRSTQ,;
CCDS3506.1, Ins, G_7,
(SEQIDNO: 6071)
GVSTCAVE,;
CCDS54060.1, Ins, G_7,
(SEQIDNO: 6072)
GWRLPDST,;
CCDS32879.1, Ins, G_7,
(SEQIDNO: 6073)
LRLRQEAE,;
CCDS47741.1, Del, G_7,
(SEQIDNO: 6074)
MEQFLQCI,;
CCDS12286.1, Del, G_7,
(SEQIDNO: 6075)
MGFLTSIT,;
CCDS30639.1, Ins, G_7,
(SEQIDNO: 6076)
RWPAPQAA,;
CCDS2885.1, Ins, G_7,
(SEQIDNO: 6078)
TPHSKEPL,;
CCDS11532.1, Del, G_8,
(SEQIDNO: 6079)
AWRARARPASTRPAMGSSRVPSTCTARPLSRTSPGCVPATPPRRRAPRSR
GTRTWRPRVTSGSTPGCEAQELTANEAARPTPATRPWSWRKNFTTIAT,;
CCDS3665.2, Del, G_8,
(SEQIDNO: 6080)
VAAAAAAAEAGAGVVGAAGNPPPPPPPPPPPPPRRSSPPAVAAAAAAAAA
GPACTTETTPRGWGKLAARQSRRCKWQILISSPPYPLNTADLWRGNA,;
CCDS14315.3, Ins, G_8,
(SEQIDNO: 6081)
GTCPECSPSAAPCTALRCPSGPALSQRPPGGPGRPLPPGAGGHSDGGGGG
GGGRTVGGCPVPTAGCLRSPALFSVPCCLQGQQPPQQLQHGRGVL,;
CCDS1069.1, Ins, G_8,
(SEQIDNO: 6082)
GPGAGALPEARAEAARVHLPPRPRALPHCQRLPGRAELRVPAGWGRRGRG
GGRARTASPPTGVGAWGSCPHPLQHHGVIPCCAPHLVGGV,;
CCDS53377.1, Ins, G_8,
(SEQIDNO: 6083)
GRRPRAAGRPPAAGPAAAARGAPGRPDGGPRSADAPAPHRPQRGERRQAL
RSLQRGRAAPEGQQQHHGVCSRAHLRARGRDRGQARLQD,;
CCDS5040.1, Ins, G_8,
(SEQIDNO: 6084)
GRGRRRGRRRRLPVVHQPPGPAGHQALGGGAAGRPRRRAARARRPAAAAS
AAATATAAATAATAAAAAATAAAASGAPRR,;
CCDS3665.2, Ins, G_8,
(SEQIDNO: 6085)
GWRRRRRRRRRGRGWWGRQEILLRRRLLLRLLLLGDPPRRRWRRRRRRRQ
QDQHAPPKRLPEAGESWLPARAVVANGKY,;
CCDS14729.1, Ins, G_8,
(SEQIDNO: 6086)
GVPLAPGESHRGARRGQGAVQQPAGARASKGQGHSGNLPHPSAVHEGHAA
EVCGRHLPGHSQREPAHPHRRQVPV,;
CCDS44063.1, Ins, G_8,
(SEQIDNO: 6087)
GAVRWLPESQHFIGSAPRLPGHSLRPALPGAKCRERGRDGRVDAASLPGC
VQRGHPPGRSSQPLHTLLPGPHG,;
CCDS10511.1, Ins, G_8,
(SEQIDNO: 6088)
GHGPWAARPRPASQSGQEPAAALALWGWRTGLACGLPPCWRSWWQGRGGE
GAWVGAHQGPGHGGPQDAP,;
CCDS1076.1, Ins, G_8,
(SEQIDNO: 6089)
GGRHEASGRSRSRGCSTHCTQCPDPQPLGSYIACRTACWGRSRSPQTDAT
STTLSSRQRAF,;
CCDS30852.1, Del, G_8,
(SEQIDNO: 6090)
VAPRCPRSAVDISPGPTSPSLASCASVAIGKLALLGASAPCGAAGAREAG
RFAVLGTMVMK,;
CCDS44234.1, Ins, G_8,
(SEQIDNO: 6091)
GGRHEASGRSRSRGCSTHCTQCPDPQPLGSYIACRTACWGRSRSPQTDAT
STTLSRQRAF,;
CCDS30852.1, Ins, G_8,
(SEQIDNO: 6093)
GWLLGAPGALWTSPPAQHHPVLPAAPLWPLGSWLSLEPVLRAVRPGPEKP
AGSLCWEQW,;
CCDS1953.1, Ins, G_8,
(SEQIDNO: 6094)
GPCSGELCARPCLRGIQWPEEATTVEASGGGPCPSKGRRPPWRGPGRSPE
GQHMGHSL,;
CCDS45544.1, Ins, G_8,
(SEQIDNO: 6095)
AAALRVPRRAEAGSAGTEGPGPRGHTAQQTAQGGHARQCPWARRGQASSP
GKQPHPE,;
CCDS13201.1, Del, G_8,
(SEQIDNO: 6096)
VARVEVAAGPPMREVAEAAAVVMVVRPVATLSPGEARAPLESVRQIYSEH
NYCRLIL,;
CCDS33088.1, Ins, G_8,
(SEQIDNO: 6097)
VPAGEASVRAASAEVGDGAGGPVRPCALLLLLPLEILVFLSPTLRLLVPG
RGDPILR,;
CCDS8.1, Ins, G_8,
(SEQIDNO: 6098)
GPGQAGKGRSSARPGGPPVDKPRIPQATEGPENGRVFPRDLPPGPQTRER
GLFHLV,;
CCDS8077.1, Del, G_8,
(SEQIDNO: 6099)
PGEEEPAMCTSQQKARRSLWRPSKAMSSSATTCHTTPSRAALMRSHWPSA
PCNATA,;
CCDS9962.1, Del, G_8,
(SEQIDNO: 6100)
TGTGSGCSCVGPPAALSPSRVPGTPWSRAPWRPPRKCILPPASAPSRPFR
GLVARG,;
CCDS45544.1, Del, G_8,
(SEQIDNO: 6102)
GSPSRSAACGGRERRDRRPGPSRAHCPANGAGWPCPAVPLGPARTGLLPG
EAAPS,;
CCDS6895.1, Del, G_8,
(SEQIDNO: 6103)
RPPCPPGRGLPLTLSALPLRCPRAPTAPRPGSPADRVRQVHPVLRAPGPP
STS,;
CCDS4774.1, Del, G_8,
(SEQIDNO: 6104)
AALTSSAISGPGWTPRPPTFLSPWPSPAIPLLTPRMSWCSSLTTWPNS,;
CCDS34709.1, Del, G_8,
(SEQIDNO: 6105)
VGAQLMAPLSPGATLTSTSCSTMSCLSRPGWAALQRLTWVCRRP,;
CCDS14315.3,; Del, G_8,
(SEQIDNO: 6106)
DLPRMLPISSPLHRPQMPFWTCTFPATTWGTWETPSTWGWRTF,;
CCDS42560.1, Ins, G_8,
(SEQIDNO: 6107)
GPPGALRHPRGTPPGPENNLGVYTEARLGLQQGESHLSPLEPG,;
CCDS53999.1, Del, G_8,
(SEQIDNO: 6108)
PADPWGLGVQPACSELPCRWRRPSWSPACWGSCCCPSWPC,;
CCDS43882.1, Del, G_8,
(SEQIDNO: 6109)
RPPCPPGRGLPLTLSALPLRCPRAPTAPRPGSPESLSVTP,;
CCDS42894.1, Del, G_8,
(SEQIDNO: 6110)
TRGTGWPLAGQQPGSCPSQHQGLPGRLPPPRPLQRVRHT,;
CCDS14752.1, Ins, G_8,
(SEQIDNO: 6111)
GPGQQALPCLRGDRHHAYPPGCAPGDWGGVRGRSEPSL,;
CCDS11765.1, Ins, G_8,
(SEQIDNO: 6112)
GPVPGHGGPGGKALPHRQDPCGQNPGGPGGRVLEPLPD,;
CCDS11765.1, Del, G_8,
(SEQIDNO: 6114)
ACTGTWGPRGEGPPSSPGSLWPESWGTRRKSPGAPP,;
CCDS11672.1, Ins, G_8,
(SEQIDNO: 6115)
ARRRGRQDGGRGRRRPPGPDHRGPEGRQQSGVR,;
CCDS12742.1, Ins, G_8,
(SEQIDNO: 6116)
GGTRAGPGPGASGCVHQEAERVSQAHRGRTGQ,;
CCDS12424.1, Ins, G_8,
(SEQIDNO: 6117)
GLRPQEGPGRHPFRRRAAGGCGPSRVRGEAEL,;
CCDS8.1, Del, G_8,
(SEQIDNO: 6119)
SRPGWKRTQQRPPWRTSRGQAQDTSGHRGS,;
CCDS11532.1, Ins, G_8,
(SEQIDNO: 6120)
GHGGPERGRRLRGRLWARAEFLQHALRAL,;
CCDS8947.1, Ins, G_8,
(SEQIDNO: 6122)
AQRGSLCLSPCDPKSAGKMRLLLRPGGT,;
CCDS8077.1, Ins, G_8,
(SEQIDNO: 6123)
GRERRSRRCAPANKRQGGVCGDLQRQ,;
CCDS5273.1, Del, G_8,
(SEQIDNO: 6124)
TLAIRFISAPQPSSSTVTAAPSGQYF,;
CCDS54834.1, Ins, G_8,
(SEQIDNO: 6125)
GLLHAVQEKLEEALVCPPPVQADVL,;
CCDS12037.1, Ins, G_8,
(SEQIDNO: 6126)
APARRPDAAVPPVRPLPARPGLL,;
CCDS8950.1, Del, G_8,
(SEQIDNO: 6127)
ASPSPSRNKSELLTSPRPLTLQS,;
CCDS42560.1, Del, G_8,
(SEQIDNO: 6128)
PARGTTSSTGNASGTRKQPWSVH,;
CCDS42594.1, Ins, G_8,
(SEQIDNO: 6129)
GRVAHSPASCCARARATATGGL,;
CCDS12037.1, Del, G_8,
(SEQIDNO: 6130)
PGQAAGRGGTTCPPTSCPSWSP,;
CCDS54834.1, Del, G_8,
(SEQIDNO: 6132)
APPRCPGEIGRSAGLSSASPS,;
CCDS42594.1, Del, G_8,
(SEQIDNO: 6133)
PCCSQPCVLLRQGPRHRHRRP,;
CCDS10524.1, Del, G_8,
(SEQIDNO: 6134)
AFWKPPSQGISSCLMTGCW,;
CCDS14544.1, Del, G_8,
(SEQIDNO: 6135)
AKAQEVGKDPMVMVNVENL,;
CCDS12742.1, Del, G_8,
(SEQIDNO: 6136)
RHPSWPWTRCLRMRPPRS,;
CCDS44327.1, Del, G_8,
(SEQIDNO: 6137)
VLQVHCLVTVTGYSLCLR,;
CCDS47669.1, Ins, G_8,
(SEQIDNO: 6138)
GCPGHLQEECAESHRAG,;
CCDS42144.1, Ins, G_8,
(SEQIDNO: 6139)
GRPPCPGRRPPATAHLL,;
CCDS9962.1, Ins, G_8,
(SEQIDNO: 6140)
GRGQARGAAVWDRQQP,;
CCDS42144.1, Del, G_8,
(SEQIDNO: 6141)
PPPLSRETPPSHSPPA,;
CCDS34709.1, Ins, G_8,
(SEQIDNO: 6142)
GWGPNLWPPSALGPP,;
CCDS33088.1, Del, G_8,
(SEQIDNO: 6143)
PCRRSQCTSCKCRSR,;
CCDS10524.1, Ins, G_8,
(SEQIDNO: 6144)
ALSGSPRLRESAAV,;
CCDS8950.1, Ins, G_8,
(SEQIDNO: 6145)
GPPPPLPETSPSY,;
CCDS2463.1, Ins, G_8,
(SEQIDNO: 6146)
APPPRQLHPPHG,;
CCDS8944.1, Del, G_8,
(SEQIDNO: 6147)
ELLHPSQRLLVP,;
CCDS43882.1, Ins, G_8,
(SEQIDNO: 6148)
GAPRALQAGGFP,;
CCDS14544.1, Ins, G_8,
(SEQIDNO: 6149)
GQRLRKWERIRW,;
CCDS13201.1, Ins, G_8,
(SEQIDNO: 6150)
GWPGWRWRRGHR,;
CCDS42395.1, Del, G_8,
(SEQIDNO: 6151)
KKWGPWSLKSKG,;
CCDS14752.1, Del, G_8,
(SEQIDNO: 6152)
PWATGPSVPSW,;
CCDS12340.1, Ins, G_8,
(SEQIDNO: 6153)
AECRGGEPGM,;
CCDS5693.1, Del, G_8,
(SEQIDNO: 6154)
AGARGEIAVM,;
CCDS8944.1, Ins, G_8,
(SEQIDNO: 6155)
GSSSTPLRGF,;
CCDS8957.1, Del, G_8,
(SEQIDNO: 6156)
MLPSLTCPWP,;
CCDS8947.1, Del, G_8,
(SEQIDNO: 6158)
TKGVAVPVPV,;
CCDS44327.1, Ins, G_8,
(SEQIDNO: 6159)
GFYKCTAW,;
CCDS42894.1, Ins, G_8,
(SEQIDNO: 6160)
GQGGQDGH,;
CCDS42395.1, Ins, G_8,
(SEQIDNO: 6161)
GRSGAPGA,;
CCDS7472.1, Del, G_9,;
(SEQIDNO: 6162)
ACGRPRWRCCWGRCTGRRRAARSTTTMAGRPSRCTAAPTPSRRSALTSLP
TCRSATRWATSACGCPTCWSTRAWPK,;
CCDS6426.1, Ins, G_9,;
(SEQIDNO: 6163)
GDAGCGRPPEPAGGGQAAAATEGGCLSLGLGCRQLGLLPGPAYTAPPVG
V,;
CCDS32912.1, Del, G_9,
(SEQIDNO: 6165)
ARPARPCPTGHSLVQMEPLTTARPTSSSTTCPRT,;
CCDS6802.1, Ins, G_9,
(SEQIDNO: 6166)
GVSLLLDLSLVCLSPGLHPRSS,;
CCDS32912.1, Ins, G_9,;
(SEQIDNO: 6167)
GPGRPGPAQRATPWYKWSH,;
CCDS8024.1, Ins, G_9,;
(SEQIDNO: 6168)
GAPGRRPRASPGFAWESG,;
CCDS9603.1, Ins, G_9,
(SEQIDNO: 6169)
GRRTGRGTSWL,;
CCDS6426.1, Del, G_9,;
(SEQIDNO: 6171)
RCWVWQAS,;
CCDS31397.1, Del, T_10,
(SEQIDNO: 6172)
LAMLSPSLTSLPAPPLYPMHSASSGSVSKKLTSMLAWPRCSLFMGSQVWS
LGCSCSWL,;
CCDS3504.1, Del, T_10,
(SEQIDNO: 6174)
WDEKTVRSNVMANVLTLNLCNRLLKSFSKWSLVQLHGIIRKN,;
CCDS2119.1, Ins, T_10,
(SEQIDNO: 6175)
FLLCVVFGKFVISRSTFRHTSCYS,;
CCDS2119.1, Del, T_10,
(SEQIDNO: 6176)
FALCGFWQICHIKKHFQTHKLL,;
CCDS12317.1, Ins, T_10,
(SEQIDNO: 6177)
FHFIWMPGQFTLDRDGL,;
CCDS3504.1, Ins, T_10,
(SEQIDNO: 6178)
FGTKRQSDQTSWQTS,;
CCDS58774.1, Ins, T_10,
(SEQIDNO: 6180)
FCVCLCVCVFYFTG,;
CCDS59050.1, Del, T_10,
(SEQIDNO: 6181)
FLQKQITLLKMKK,;
CCDS12317.1, Del, T_10,
(SEQIDNO: 6182)
SLHLDAWTIYS,;
CCDS31397.1, Ins, T_10,
(SEQIDNO: 6183)
FWPCSLPH,;
CCDS45955.1, Del, T_11,
(SEQIDNO: 6184)
FSSKGVRATQSHRISQVSQNSSSWDSQRIQNCSRSSLGCSCPCTWSRCWG
TCSSSWLSALTPTSTPPCTSSSPTCPWLTSVSPPPRSPR,;
CCDS45955.1, Ins, T_11,
(SEQIDNO: 6185)
FFPQKVSELHRATESHRCLRIPPPGTLRGSRTAAGPRWAVPVHVPGHGAG
EPAHHPGCQL,;
CCDS58832.1, Del, T_13,
(SEQIDNO: 6186)
FLRWSLTLSPSWSAVVQSRLTPGFK,;
CCDS45501.1, Ins, T_13,
(SEQIDNO: 6187)
FFSVIFSTRCL,;
CCDS45501.1, Del, T_13,
(SEQIDNO: 6188)
FFCYILNTMF,;
CCDS53350.1, Del, T_7,
(SEQIDNO: 6189)
ASGELTCHGCLCFVPFCWSSSFSLWFPIGFFTGSAFWTLGTGITRALCNM
QSPLWMPSSSSITWPSSCWSSGSCSPCSRCRWSAPPMASPASTAWDT,;
CCDS48169.1, Ins, T_7,
(SEQIDNO: 6190)
AEVSVYEAERASGGQAKASGTTQISEGKAPSDPFPEPGSGPEPESESESE
SEPKSECQSEPDSESDAESDSEFEPEGEPGKPEAELRQGAE,;
CCDS11266.1, Del, T_7,
(SEQIDNO: 6191)
QRQRQLQQRSSHSLPYSHHQCHRYWLILKTQQGILWVNQHNSATLFLDNQ
YHLPKSLLDNQHQLSIPLLKNQKHILLLDNHLPTTPNNQHQ,;
CCDS3793.1, Del, T_7,
(SEQIDNO: 6192)
YGTLYPKSSIFKKLLPIPLALERLLILLQVTKTSALWNLSGTKVFISTIA
LCWTVSFLESHVAQRILHMSSLNMEIVLLLIMVKLSKQREK,;
CCDS30955.1, Del, T_7,
(SEQIDNO: 6193)
MTFFGETGMMKKVVRIILHLLKKELICGVIYRMEQYLVLSHNVLKKLWRN
IKTNVSSSLSIRAILKKIHLQQRLLNAGKNTMR,;
CCDS35089.1, Ins, T_7,
(SEQIDNO: 6194)
LLYVHPLIAHLANEFSHRKTQGIFHVLSSPDCGDHILRYHLLYVCETEVS
RPDWGRKIASIRQAHFSVLWGSDTHAESYTL,;
CCDS47187.1, Del, T_7,
(SEQIDNO: 6195)
MKIFKLQLTSSNFPLLFCHQCPRPLRCHHLTRVPYRLHLHLKPTLENTQI
PAIMTQSSLEILLSVFQKMIQLNHRIILAH,;
CCDS5370.1, Del, T_7,
(SEQIDNO: 6196)
PLHLSACKTTGEVPPRSSGQPGCFHLFLDWAKVKTIDVHLQMQHPVPGAL
RWVQNVDGVFKRISFQVDQEVNVVILFPI,;
CCDS7831.1, Ins, T_7,
(SEQIDNO: 6197)
MCGSLCFQPGPAGQDPLWIPEDAADQAVRDHPAHSAGLPPLRPALRHSGG
PNLQDAPEFGSLILSCLSGLHVPVLSKQ,;
CCDS32595.1, Del, T_7,
(SEQIDNO: 6199)
GSRMSVLSFSNTSKQWKLITCGFPANSLAMIFHTMWHCALEKCVSERTYR
KFLTCLPHSPRALGWIKRNCPSAHPY,;
CCDS2035.1, Ins, T_7,
(SEQIDNO: 6200)
HQPCYPDRHIYWIFSWKYLMVGCSWLLYLCNFPGIQCIAIFEKYSNSSVS
ICTSDSALRAFPGTGMELHPYSLFFL,;
CCDS2300.1, Del, T_7,
(SEQIDNO: 6204)
VAVACFGILVIWARVSASLQLAPKHLDWQISGKKFQHLDFSELILSLLSF
PDALFYNCILGNIFLGRILLKKMLIA,;
CCDS13643.1, Ins, T_7,
(SEQIDNO: 6205)
WQAADGDGSSHCSRDIESHCRENRFLSEGGSCALESAEQRDPGASRHLRR
IVLPAALPGPYGQHLRGHEILPCPPGP,;
CCDS5104.1, Del, T_7,
(SEQIDNO: 6206)
LIQFWDWKIQKTPWFIHGLVRESVLTALLQFQVLKQSQNYLWTTNLQDSL
QAIQKQLATIQILHWSYQVMRH,;
CCDS57972.1, Del, T_7,
(SEQIDNO: 6207)
VPMIPTMTWPHSSSTRRSLPSSSSSTRMVLSAPSLWPCSSFSISCLHVGL
TAFLFQVAFLCLLCCVELLLDV,;
CCDS55189.1, Ins, T_7,
(SEQIDNO: 6208)
QVQKRLPYSRFHDSHLPCQFNMEWDTDRMYTSCLQTARNPGTRGCESHRS
SYFRLHLSVHLPSRLFPRRGI,;
CCDS55741.1, Del, T_7,
(SEQIDNO: 6209)
IYCTFYLSSQRGKQLQRMGNAILPCLETPTGKLVTLKRLTQFMTFQTVSS
VGKKQSWWITLTQKNFLLKK,;
CCDS31915.1, Del, T_7,
(SEQIDNO: 6210)
QTIQPPLLLCLRFRESLWMETKHPDLECRHRYKVKSLQQTQKMMMTTMMR
MMMMKKKTQRIGTPGSPRRE,;
CCDS43483.1, Del, T_7,
(SEQIDNO: 6211)
RKFPLKKLMADLLPVQEPMKRASKEVVGKRKTKLKLYHLNLKYNLEANKN
FSFLMKKKKLEKTTPSSLAQ,;
CCDS389.1, Del, T_7,
(SEQIDNO: 6212)
IKQLIKLKKHYIPIYHKPQKQTLGIPATHLPIKNPLVRNWGIPLHQILEL
KKNLWMMSMTKQWHHSRDY,;
CCDS4822.1, Del, T_7,
(SEQIDNO: 6213)
KALTGNISERDLLQYLLKSKALMIPQTSMSFQNLIFLSQQWPQVIILRLT
TRTKTGSSSITRTSALRA,;
CCDS58048.1, Del, T_7,
(SEQIDNO: 6215)
PFCTAGSMPLLRCYALVTGCSIRIGGTPRHTPTIIEPGMWWSMTGYITML
TRTFSGFSPRDSNLLPC,;
CCDS7113.1, Del, T_7,
(SEQIDNO: 6216)
LTCILEKEPVGGPSTSPKAKSFSSTSLSLKLEVLPTVKQIMLRLVAVPFW
VLLKIKSIAVQTYLHL,;
CCDS5843.1, Ins, T_7,
(SEQIDNO: 6217)
FQCCCHLWYGYCSLLFASDHHDCAILAHIPSQQEQDKEGQEGACCQPRPR
FSKSGTRKDSEAKQ,;
CCDS5108.1, Del, T_7,
(SEQIDNO: 6218)
KTRGQILFPCLRLLPGRLLQSCILSTKASNTIAPSTEWWTMVCNLALRMM
RRQWSLWVLPTIC,;
CCDS41446.1, Del, T_7,
(SEQIDNO: 6219)
MMKTEQFQVLQLLWCHIVLMDLLKQFIRRRLLVSLDSGLGHLKICHKQVL
VTLILASLLLKEV,;
CCDS6160.1, Del, T_7,
(SEQIDNO: 6220)
LGLPANLRFVLIILWNFSVPGKQVFMILKGSHLALLNRYLVVHLCCRNSR
RKDKISVMLVL,;
CCDS7450.1, Ins, T_7,
(SEQIDNO: 6222)
CYSSSKSCWYNTWPKSVRSAQLSLSCQCCASSYTGEKMVHGACGYCLPGW
NFTFWFNLY,;
CCDS7847.1, Ins, T_7,
(SEQIDNO: 6224)
IHGSLWVQSGPAGQDPLWLQGSATDQAVPDHPAHSAGVPPLRPALWHSVV
PNIMDLEGF,;
CCDS4935.1, Del, T_7,
(SEQIDNO: 6225)
MQATLCARQETWPQDPTTCQFFIQEMGMLVLVMFPDTSTLCPKCFIIFLR
ISAYMVEAS,;
CCDS59415.1, Ins, T_7,
(SEQIDNO: 6226)
FLNPFRRVGLGHLHWSHRQLPGPPLWGLALFLVLHPGLGGSAHDVLRRDF
LHVRLPGA,;
CCDS4872.1, Ins, T_7,
(SEQIDNO: 6227)
PSRLRPAAGTRGAGAAAGGLGRAAPGAAAQEAFRFQDPGKGCCFVYQSRR
GSWHPPGS,;
CCDS10129.2, Ins, T_7,
(SEQIDNO: 6228)
PSSYWDSCWCQYLRRFGGSPRCHPQRNHAGHFHHHCCLLRGCNLCRGLCG
PRCHREHE,;
CCDS4658.1, Ins, T_7,
(SEQIDNO: 6229)
SGKPFLSGYFLFFSDTAQAARKPRVQSQGYIFSRLYHPATLLPLFGKHRG
HFTGYHGL,;
CCDS6649.1, Del, T_7,
(SEQIDNO: 6231)
CSFLPTLYSTDVLKLININFILGSISLAITGDQLIRFDPSFSLMLTPTVF
LLVLTFL,;
CCDS55504.1, Ins, T_7,
(SEQIDNO: 6232)
SKSWVYPSIRFSWNSNFLFRYWVNNVWLCNADEGNGTTCRRFLLYRLPTV
WCHCISN,;
CCDS42173.1, Ins, T_7,
(SEQIDNO: 6233)
GDRRRAPQHESSDRCALHGPVQGHQSPVQLLQPQVPPACQPALLDLPGLS
DDSPTQ,;
CCDS31098.1, Ins, T_7,
(SEQIDNO: 6234)
SDTGALCFHCVLHIENPFHLWPEKDLFHMWLPPGCCHSLLRDHDLHVCVS
QSPPVA,;
CCDS3569.1, Del, T_7,
(SEQIDNO: 6235)
HEGPESILGFQTDLSSLQGVTTVFHSSHFIGHTVTLLIGISPEEDSREEA
HLRKA,;
CCDS2368.1, Ins, T_7,
(SEQIDNO: 6236)
PDSDQPGPLYPLDPSCLISSASNPQELSDCHYTHLAFGFSNWRSCPVLPG
HCGVQ,;
CCDS34081.1, Del, T_7,
(SEQIDNO: 6238)
GKLFRRSKFEAKPTSGPWQPGRNITTKLIQRPLRSSLGSRKTPPSLPFLG
EEEL,;
CCDS56396.1, Del, T_7,
(SEQIDNO: 6239)
QNSSFSGNWWETQDPKREIMSLQGLKLKKTLPPLHTESDPLAKGGHLLMK
ATDP,;
CCDS6491.3, Del, T_7,
(SEQIDNO: 6240)
KLLGNFLCLSTNFLCLDHILFPLKSTFHILCKTSLFLHHKDRESLSSCQS
MMH,;
CCDS12954.1, Del, T_7,
(SEQIDNO: 6241)
TLESALEKGFMNLANVGKPAAVSAPLFSCKESTLEKGLMSAVNVGNLLAK
PLI,;
CCDS1476.1, Del, T_7,
(SEQIDNO: 6242)
GVRAVLWLRGEFLLQMQSTVQSFLQWTIAYLSQRRWKDRFWGLTFVSRAT
TW,;
CCDS7179.1, Del, T_7,
(SEQIDNO: 6243)
KIMFGICIREFWSQKNKYLLCIIGTGKNTARVQTIWTAYIGISTPSLLKR
IN,;
CDS528.1, Del, T_7,
(SEQIDNO: 6245)
TMVPYELQEILGTSPPCSAMILWTLVSLREHMLESQGTHLVGIALPEVMM
A,;
CCDS7393.1, Del, T_7,
(SEQIDNO: 6246)
VTLLYVNTVTLAPNVNMESSRNAHSPATPSAKRKDPDLTWGGFVFFFCQF
H,;
CCDS31815.1, Del, T_7,
(SEQIDNO: 6247)
WPFIQSLCWATFLLSQLPVWISHFKHPCTSFFKICHFLKYVSPWLWCQKC
L,;
CCDS31816.1, Ins, T_7,
(SEQIDNO: 6248)
HLHVEHHWESNHHHSHPTGFASQDTHVFLPPKFLIFRSLIHNCLHSQIS
C,;
CCDS6195.1, Del, T_7,
(SEQIDNO: 6251)
NHSAGLTLYKRRFHHHLILMWLDQMISETLTQHLQKKQFHILCVYLLTI
L,;
CCDS43455.1, Del, T_7,
(SEQIDNO: 6253)
IMPFRWIPACLSLIPSLPRDLRLPGISGLSTLPRSPWTLREQKTSKAI
P,;
CCDS1285.1, Del, T_7,
(SEQIDNO: 6254)
PTPFCTTLRNFFLSSLILAVLCTNCIFRYTASFLQAFMLPGFLKHTKR
K,;
CCDS9303.1, Ins, T_7,
(SEQIDNO: 6255)
SASRQTTSGLPFHYPWRQTKGRWRLSTPSCSSYAESSPFLKEFSNFAN
S,;
CCDS44470.1, Ins, T_7,
(SEQIDNO: 6256)
DNTRFPYVCLSLCPVSCPCVKVAVSDDVSSYRLYCVSADFKYIDGNNN,;
CCDS7113.1, Del, T_7,
(SEQIDNO: 6257)
RMDPGHMAASLLPIPPVKMQCVVGLFQILLKETLLLLAMTESGITQET,;
CCDS55171.1, Del, T_7,
(SEQIDNO: 6259)
CPRYAKVIRERVGSRFVTSSHRVQDSTSVTTSPEGTVVFPTASGPIT,;
CCDS7480.1, Ins, T_7,
(SEQIDNO: 6260)
LLYRGCVAHWWPLPWANICQGCSGLLWHGLVGTNSEIQEWPLFITCR,;
CCDS9701.1, Del, T_7,
(SEQIDNO: 6261)
MVRESGHLEIVHMKTTDIMNTTMISSKECHRIRGGMLQVLGELLLHL,;
CCDS9489.1, Del, T_7,
(SEQIDNO: 6262)
PSFTWLLMLEVCFPQSSHPCSEFNNVEFTVNKLVTHWPLGFLLLSWL,;
CCDS9607.1, Del, T_7,
(SEQIDNO: 6263)
RRSSPCSSTCSMPRTEPPAPEMIPSSALRSAPWARLCHKPRSLSHYC,;
CCDS35088.1, Ins, T_7,
(SEQIDNO: 6264)
LLYVHPLHHLANELGHRKTQGIFYMLSSPDCGDHILWYHLLYVCKT,;
CCDS14587.1, Del, T_7,
(SEQIDNO: 6265)
LMIRVCILICMPEHTSTLKTKRTLFCSGIALMVMYSLTIKVRNIPL,;
CCDS4844.1, Ins, T_7,
(SEQIDNO: 6267)
RRHQPNDCRDSYEPSFNPFPLHFHHSFVKQGTRICNCTTCQTPSG,;
CCDS46694.1, Ins, T_7,
(SEQIDNO: 6268)
YLVYFSPGSGHGCTLPRSKQLSRLLRLSGKTNVPGVWMRRLPQVH,;
CCDS11622.2, Ins, T_7,
(SEQIDNO: 6270)
KSYFGPFELLGSILDCWNYRLHSEILFHGLKMPYFIGAFFHHAF,;
CCDS2226.1, Ins, T_7,
(SEQIDNO: 6271)
LYNSFGFNAKRSKCSIFQRGIKDGKEHEKQKQDVGFNARSCKQY,;
CCDS6216.1, Del, T_7,
(SEQIDNO: 6273)
PPCFLPYLLKLRSSIGSATHPMQVFHTPTVIKCNTQFQLMLTPV,;
CCDS11160.1, Ins, T_7,
(SEQIDNO: 6274)
PSHRARASRARQLPRRSGLRGPARGTSGAPSRAVLGGCSTRPGQ,;
CCDS46495.1, Del, T_7,
(SEQIDNO: 6275)
QEVAWVLKPLLPIQVCWSWQCAQKENMQRLCFLTTVSVIPSGTT,;
CCDS4016.1, Del, T_7,
(SEQIDNO: 6277)
VMPLHHGLTQKMISETCSVRSFMDLKIKLAMKIGGVSLTSFLFP,;
CCDS35063.1, Del, T_7,
(SEQIDNO: 6278)
WSGLNIVSARLNISRKSTQMPCTSRRGPPPAPWGSAAPAGQGLN,;
CCDS5363.1, Ins, T_7,
(SEQIDNO: 6279)
LYDYSVTCIYCSVFCILRLFSPEPGATGSASGGWLEQYGKCSK,;
CCDS47554.1, Del, T_7,
(SEQIDNO: 6280)
PHYLVVDLGWTVTPFGMSYTRPVLHAWLLAVSSSWLPKWPQES,;
CCDS7926.1, Del, T_7,
(SEQIDNO: 6282)
ANMDAQPMMPTPNIIAELPRCTGRRSGSWGVRPWLGMALIFG,;
CCDS41444.1, Ins, T_7,
(SEQIDNO: 6283)
AWLESDLYYAEAFGNESTFWKPSVSDSTPAFSDSSRGTAQSV,;
CCDS861.1, Del, T_7,
(SEQIDNO: 6284)
CVWPHWGLKPIRNTAMFQYYLQNRLIYILRWKKSQIRKNSLL,;
CCDS3646.1, Ins, T_7,
(SEQIDNO: 6285)
FCVPGNYFLPGAHCRSSSICFQRLDQRPAVFLYKQQHQSISG,;
CCDS10315.1, Del, T_7,
(SEQIDNO: 6287)
KGAGATVELLFMSSTPNQAQSSILTGLTPIDPRKRVNVWSSI,;
CCDS59415.1, Del, T_7,
(SEQIDNO: 6289)
PQPFSSCWPWPSTLESPSASWAAALGTGAFPGPTSWAGWQCS,;
CCDS45880.1, Del, T_7,
(SEQIDNO: 6290)
CLRLHMQMDWYMTQSWGAKPTMACSRWQDLGDSILYIQHLT,;
CCDS7421.1, Del, T_7,
(SEQIDNO: 6291)
EQRNTLKKMNTASFSVSMQEVQMPLLVESIPITILMFLMNT,;
CCDS13515.1, Ins, T_7,
(SEQIDNO: 6292)
FGESRGPLGQPLGGPQLSEQRSGPLPKQQHRPELLGDLWKC,;
CCDS58279.1, Del, T_7,
(SEQIDNO: 6293)
FSEGTMNVPASTEFMDFMMNVKEDTTLNYGKLSQTVLTVYR,;
CCDS2171.1, Del, T_7,
(SEQIDNO: 6294)
FTSVRLKIGVLIYLGEQKIPTKKLIIIHWRKFVQILIFSTV,;
CCDS32205.1, Ins, T_7,
(SEQIDNO: 6295)
HGDVYCICPVWCSVAGMVCLLLERSPENSVLDWCCHLPGNA,;
CCDS45841.1, Del, T_7,
(SEQIDNO: 6296)
LTWPSLTSLWFQSLGRMKVVNVNLDFFRNGTSLPSFIHSWNS,;
CCDS14521.1, Ins, T_7,
(SEQIDNO: 6297)
RFCVLFYYYGGNCGLFYLLFCSKATECKSSKQEAEAIKGRC,;
CCDS34732.1, Del, T_7,
(SEQIDNO: 6298)
TLGGSVTQKLKMTATGVPVIPPLVISWWAGTRSLWLLLPVG,;
CCDS47723.2, Ins, T_7,
(SEQIDNO: 6299)
KLPVFNATAVRRRHYYTVALLGGGLTASRGGLGHKCRQIH,;
CCDS14127.1, Ins, T_7,
(SEQIDNO: 6300)
QPSLPSSPNPDPFLGLPSLLPAPELLHDEELRDHSAAHVL,;
CCDS1790.1, Del, T_7,
(SEQIDNO: 6301)
QTQPGGSKDFKQLNMNFMNWVCSRITLWRGGISRITVMEV,;
CCDS30587.1, Ins, T_7,
(SEQIDNO: 6302)
WPDEQWEEHRDQCHALGQSSALWDWPFIHQLLPAGRGHRWP,;
CCDS47774.1, Del, T_7,
(SEQIDNO: 6303)
AILVRKSVTFALIPGIGVAYQIQMKKEKRNQRWMADLGS,;
CCDS31669.1, Ins, T_7,
(SEQIDNO: 6304)
FQGYSVCETRKELFRSKSYLSSSYYLPQDFGCQLSNSSV,;
CCDS11021.1, Ins, T_7,
(SEQIDNO: 6305)
ILWYNDGHVFPPSDQLQPQRCSDNCDVCGSDPSIKSFHL,;
CCDS4446.1, Del, T_7,
(SEQIDNO: 6306)
LTAKFKMGLKVFVSSTPEKADQVARLLLNLNQKMKSNWP,;
CCDS2293.1, Ins, T_7,
(SEQIDNO: 6307)
LVKYCTRSHHQVKSYTPSGIQSVHESCESYSYLGAIAWH,;
CCDS3609.1, Del, T_7,
(SEQIDNO: 6308)
PVWPLIMLLQIIPSQQVLLMGLWSVALVLVKDSSLLPPA,;
CCDS34342.1, Del, T_7,
(SEQIDNO: 6310)
CLDRAGHPAVRREPASSLICRVPNSQLGMSASRLPSRT,;
CCDS54873.1, Del, T_7,
(SEQIDNO: 6312)
KICVKALKLVTPVRSWWDILPCIESVLEWLVSSLSSVY,;
CCDS31977.1, Ins, T_7,
(SEQIDNO: 6313)
LFIILPWAHCMWNFMCVFGHCPLGNQTAATEKEKISVN,;
CCDS31815.1, Ins, T_7,
(SEQIDNO: 6314)
PGHLYSHFVGQLSYCHSYQCGSRTSNTHVLLSSKSVTS,;
CCDS9255.2, Del, T_7,
(SEQIDNO: 6315)
QHCPSISTGRVQPWESHLEKSLIPLSMNQTCRPCLGRQ,;
CCDS2926.1, Del, T_7,
(SEQIDNO: 6316)
QKLTWRNINFCLNTQVFSLMSRRGNTSSTNLKYVRRMI,;
CCDS10129.2, Del, T_7,
(SEQIDNO: 6317)
QQLLGFLLVPISQEIWRIPKMPSPEEPCWPFSSPLLPT,;
CCDS8689.1, Ins, T_7,
(SEQIDNO: 6318)
SGWCICSPYWLAFDRHDLRNLWIFSLVQGLLSCRCWLY,;
CCDS6632.1, Del, T_7,
(SEQIDNO: 6319)
VPCSVLVKLISIQKMRKIMINMEFELESNFEVVLNCMN,;
CCDS3436.1, Del, T_7,
(SEQIDNO: 6320)
AHLLVYILWAVDGRKKKNKWNAMVVLNKSLNRVHLLG,;
CCDS8961.1, Del, T_7,
(SEQIDNO: 6321)
PPLYSWLHMLKTKELMSTRQLFCYLLWLSLICLLGLL,;
CCDS3114.1, Ins, T_7,
(SEQIDNO: 6322)
SDSIFACSRRRLWVSLSWSDNSSSETDSKHSHYDGHL,;
CCDS9347.1, Ins, T_7,
(SEQIDNO: 6323)
SHPKVFTGFHSFSIFCFYYFSLPYILLLEERQKKLQI,;
CCDS42012.1, Ins, T_7,
(SEQIDNO: 6325)
TPYMGGGHSWSSSGFCNCPYLLLLYNVDCYLHECHCH,;
CCDS47907.1, Del, T_7,
(SEQIDNO: 6326)
ANQEISIVKTIVVCLKVGCVILKMTVVMAAMKKIAQ,;
CCDS31378.1, Del, T_7,
(SEQIDNO: 6327)
CIVTPMFFHMHSAFTRMSLNSPVLIPPSTDCTQLCL,;
CCDS14521.1, Del, T_7,
(SEQIDNO: 6328)
FLCPFLLLRRQLWAILSFILLEGYGMQELKAGSRGN,;
CCDS46718.1, Ins, T_7,
(SEQIDNO: 6329)
FQVPHGVWDRGSGEEPAGKPEDEQHRAAQAGPAAFR,;
CCDS1456.1, Ins, T_7,
(SEQIDNO: 6330)
FTDTHHTDSKPLALQYPLLEYSQSCCSPKSSQTARC,;
CCDS31977.1, Ins, T_7,
(SEQIDNO: 6331)
KETLSCGRFTVSSLHTAGPKSRIHFSWLGSSNAVCS,;
CCDS32020.1, Ins, T_7,
(SEQIDNO: 6332)
LHCYCPGKPLDSGNSASPCSPAPISYVLFFRSSLFH,;
CCDS53894.1, Del, T_7,
(SEQIDNO: 6333)
LPSSLTSSKISSTCYFIMTGLKSLQTTKPMSSVKIK,;
CCDS3416.1, Del, T_7,
(SEQIDNO: 6334)
QIMKFQTSRRKKLHESRSGLCMKLGDPMWNPAGKAA,;
CCDS13629.1, Ins, T_7,
(SEQIDNO: 6335)
QSEYCCSKTNSTKKPGNINKRIPCIIWISTSEKRSG,;
CCDS1197.1, Del, T_7,
(SEQIDNO: 6336)
RSHFSWAMVGWRLSFFSLASLWPMCLRGCWPQSLCA,;
CCDS11587.1, Ins, T_7,
(SEQIDNO: 6338)
TSLQCLVLESETKEQESQETGESNSSRGKSEKLVCL,;
CCDS5149.1, Del, T_7,
(SEQIDNO: 6339)
VKSWLFSNLPVQIPTSMRTWSWPEQFLGWWDPCPQL,;
CCDS33237.1, Del, T_7,
(SEQIDNO: 6340)
CSSISWSCSSWPGFLRPLCGMKLASLPPSWWIRWR,;
CCDS11887.1, Ins, T_7,
(SEQIDNO: 6341)
FGMVHPCHHIILGIRDPSHLSRLFQHEYLLEPVEA,;
CCDS9727.2, Ins, T_7,
(SEQIDNO: 6342)
HRFQAFWLICWRNPCCGGVFIFSSNMAVVHCSRGF,;
CCDS6707.1, Ins, T_7,
(SEQIDNO: 6343)
IREGTAPDYSLRVALHSEPADNSRGCGGSFPCPCH,;
CCDS47522.1, Del, T_7,
(SEQIDNO: 6344)
ISLTTRGTMRRLLPSTWTGSWTSAGSLPWPAGWST,;
CCDS47510.1, Ins, T_7,
(SEQIDNO: 6345)
LYVYFISVFSDSLYICIRYHPRHSSFTANRIPKCP,;
CCDS31083.1, Ins, T_7,
(SEQIDNO: 6346)
PRKPSRQRGSSDESWQTAATSRHVSPSNEESETGF,;
CCDS43218.1, Del, T_7,
(SEQIDNO: 6347)
SGKMKSCQELDLLPEKLITEDVSLPCPERSVWKGT,;
CCDS45338.1, Ins, T_7,
(SEQIDNO: 6348)
SIKHSIWSSSSALGLSLYLQTRVLHKNKGRRKSGI,;
CCDS6766.1, Del, T_7,
(SEQIDNO: 6349)
SMKKLITCGMEALRPKQEKNSNTCFRSLHCAGLSL,;
CCDS31915.1, Ins, T_7,
(SEQIDNO: 6350)
FKLYSPLCYYVFVSGRAYGWRPNIQIWSAGTGTK,;
CCDS13133.1, Del, T_7,
(SEQIDNO: 6351)
GLALTCLSVCSTQTSVLLFFIKKSSLPLASWFLM,;
CCDS31977.1, Del, T_7,
(SEQIDNO: 6352)
IHYSSLGSLYVELYVCVWSLSFGESDCCYRERKN,;
CCDS54483.1, Del, T_7,
(SEQIDNO: 6353)
ISMEVKFKDARVVQFEQTAWIVLIEQIVCRHFLA,;
CCDS14161.1, Ins, T_7,
(SEQIDNO: 6354)
KSRRSFNWEVPTDISKEETYRAHGRSFCTSCSIP,;
CCDS12419.1, Del, T_7,
(SEQIDNO: 6355)
RIQMKKWPKSTGRRGTSVGASLGTIMQSVQTPAP,;
CCDS1661.1, Del, T_7,
(SEQIDNO: 6356)
RMDSKPWKASNLPLKRCLRIFTRSNRPRMKKEGS,;
CCDS2079.1, Del, T_7,
(SEQIDNO: 6357)
VESVVILMKTMEMGRTFNQSFKKFRKLKNLRQKK,;
CCDS7394.1, Del, T_7,
(SEQIDNO: 6358)
VTLLYVNTVTLAPNVNMESSRNAHSPATPSAKRK,;
CCDS9376.1, Del, T_7,
(SEQIDNO: 6359)
ASLLVFILPALNLVRVSSLKKKKYQVSLALNGT,;
CCDS5004.1, Ins, T_7,
(SEQIDNO: 6360)
CICLNKKDSQGGYSIYYNQETIKSSNEAYRSDS,;
CCDS34120.1, Ins, T_7,
(SEQIDNO: 6361)
FICHANISQGRVPEQLPIKVQSRRNTYRYKGAE,;
CCDS45065.1, Ins, T_7,
(SEQIDNO: 6362)
GCGDSKSDGRTSCSSCQSSKIFLCWDRGVPCGL,;
CCDS12271.1, Del, T_7,
(SEQIDNO: 6363)
GLVYFVCMKELTLERNRMNVSSVVKPSLFTVPI,;
CCDS32918.1, Del, T_7,
(SEQIDNO: 6364)
GPVYYICMKERTLERNHMNVSSVLKPFLFTVPI,;
CCDS45988.1_ Del_ T 7_
(SEQIDNO: 6366)
GPVYYVCMKELTLERNHMNVSSVLKPSLFTVPI,;
CCDS58789.1, Del, T_7,
(SEQIDNO: 6367)
LPQTHTGIHQLGVYTPTLGSPPAICLLIWALTT,;
CCDS14231.1, Del, T_7,
(SEQIDNO: 6368)
LVELQKAIKCTIPWWNIALRLHQEKMFETLPRY,;
CCDS44927.1, Ins, T_7,
(SEQIDNO: 6369)
LWRLAEQKSNFLLLYWDDCGNCGLSANHHFYTI,;
CCDS58971.1, Ins, T_7,
(SEQIDNO: 6371)
NKPMYIDFWDGKPTYVLLKQGYVISIFGHFCAW,;
CCDS2194.1, Del, T_7,
(SEQIDNO: 6372)
PNMQIHLSLLFMIALLQLEKMPPMWLSVLSGRS,;
CCDS56540.1, Del, T_7,
(SEQIDNO: 6373)
PPCFLPYLLKLRSSIGSATHPMQVFHTPTVGEI,;
CCDS4038.1, Del, T_7,
(SEQIDNO: 6374)
TCGDLEESANKPANLLKSSKKMLLHVHWSLLEI,;
CCDS7335.1, Ins, T_7,
(SEQIDNO: 6375)
TLKLGAPGLPSESFCPATASHTPQPPRTRATAW,;
CCDS10900.1, Del, T_7,
(SEQIDNO: 6376)
VKVQTHISVIPSLESSPLGVQDWGNPSALIQNS,;
CCDS5370.1, Ins, T_7,
(SEQIDNO: 6377)
YRCICLPAKRPARSRLVPLGSLGVFTCSWTGPR,;
CCDS9804.1, Ins, T_7,
(SEQIDNO: 6378)
AADCDSFFVCFDFPVYCRASYVSTTMFWSQRN,;
CCDS3630.1, Ins, T_7,
(SEQIDNO: 6379)
CRSMQKVLVENDCGRFRKCTMLRHIQSLSIYL,;
CCDS12149.2, Ins, T_7,
(SEQIDNO: 6380)
FFVTGCDACSESREGHVQVLRSPPQPEFRAVF,;
CCDS53691.1, Ins, T_7,
(SEQIDNO: 6381)
IAFHFHETKCGVYIQRNWGPHDQRQQSEDEVL,;
CCDS34759.1, Del, T_7,
(SEQIDNO: 6382)
IGPRLNKLLLTVNTRIYGDRQSAMSSFFIGFL,;
CCDS7480.1, Del, T_7,
(SEQIDNO: 6383)
IVQRMCCALVAATMGQHLPRLLRITVAWLGRY,;
CCDS42696.1, Del, T_7,
(SEQIDNO: 6384)
LAAPRPRHAPSFSVAAPSSLWRRQSGPCMMPS,;
CCDS54612.1, Del, T_7,
(SEQIDNO: 6385)
LRLLNIMGVPILFWCTFQAEWPSSFRMWICRI,;
CCDS3528.1, Del, T_7,
(SEQIDNO: 6386)
LVVSCWLRYLTYRLCTVSASLLATQLKGTVED,;
CCDS56443.1, Del, T_7,
(SEQIDNO: 6387)
RLFLPRWKSGMKGRLKKHEAKPIRKPSKIRLH,;
CCDS31826.2, Ins, T_7,
(SEQIDNO: 6388)
SPKFIFLRNLIYSYLCSKILIQYLNWEQNNNV,;
CCDS42116.2, Ins, T_7,
(SEQIDNO: 6389)
SRDRVSSCCSCWSRTPDLKRSAHLRLPKCGII,;
CCDS8022.1, Del, T_7,
(SEQIDNO: 6390)
THWCLTPCRRHFSLIRARLELVANTKLRSQIA,;
CCDS2736.1, Del, T_7,
(SEQIDNO: 6391)
TMTFRASRVRTRPGSLLPSPPLSYTAWCFSSA,;
CCDS2602.1, Del, T_7,
(SEQIDNO: 6392)
WRQLWGSSQVKVALRVGGKFALYLKALAMQHR,;
CCDS1954.1, Ins, T_7,
(SEQIDNO: 6393)
AESALWDQEVEEDLGRALPGQSPRRSAARVL,;
CCDS31028.1, Del, T_7,
(SEQIDNO: 6395)
GSVCMEKAPLRICVTLWSRLVLALSCCCLCS,;
CCDS55516.1, Del, T_7,
(SEQIDNO: 6396)
HLNKWELDTLSFKHVNFFQKGRRLGDKIRAT,;
CCDS748.1, Del, T_7,
(SEQIDNO: 6397)
LQRKISILQRVKAKFLNELHHLRNQNASKMR,;
CCDS31021.1, Ins, T_7,
(SEQIDNO: 6398)
LYPLSQLQYAEDLLLRRKVQQMHYLSAHQVV,;
CCDS8342.1, Del, T_7,
(SEQIDNO: 6399)
PVAKRSSICTECFAGYVLVFLSLHSMVDSSK,;
CCDS10128.1, Ins, T_7,
(SEQIDNO: 6400)
SSSLQWLETRQKVGNSLPIIILGACYIISSI,;
CCDS2987.1, Del, T_7,
(SEQIDNO: 6401)
STCWLLFSFSTSTFIKQCGGILTIILLLVHH,;
CCDS34061.1, Del, T_7,
(SEQIDNO: 6402)
TCSFKEHFSLRNCIPAPVPVLSSTMLPVQYF,;
CCDS6195.1, Del, T_7,
(SEQIDNO: 6403)
TYKENGPFLSTELGFTLLKLLVHWVTYIPSK,;
CCDS14238.1, Ins, T_7,
(SEQIDNO: 6405)
CLFVLFYFCRDLFLPLEQDAFFSPSALGHL,;
CCDS8992.2, Del, T_7,
(SEQIDNO: 6406)
DFIGYSSSGEAASTNYCTGNLLFLLFFIQQ,;
CCDS4987.1, Del, T_7,
(SEQIDNO: 6407)
DQVSQRKYQNWSFILTKLTVSSFPTLVTGL,;
CCDS42654.1, Del, T_7,
(SEQIDNO: 6408)
GKKEILWPLPIAPGWFSFFMPFKMIGICTW,;
CCDS34680.1, Del, T_7,
(SEQIDNO: 6410)
IIKMSYLKDIWSILYQEVVIFQGIQTMNIN,;
CCDS3553.1, Ins, T_7,
(SEQIDNO: 6411)
NQARLWTCWNARICSSHRHVSSSEKLYPES,;
CCDS54446.1, Del, T_7,
(SEQIDNO: 6413)
SMSTLRCRPPTLRMKRLPVAVCSCTPPEST,;
CCDS56326.1, Del, T_7,
(SEQIDNO: 6415)
VPMSLACSITVSFVGQISTLVLDVSSISHW,;
CCDS8132.1, Ins, T_7,
(SEQIDNO: 6416)
CCGHSLRGQEARAAGLPLHTPELGSAVQS,;
CCDS3828.1, Ins, T_7,
(SEQIDNO: 6417)
CVSSWEGKTMQFFPVGRKWARNKNYSWML,;
CCDS55882.1, Del, T_7,
(SEQIDNO: 6419)
LAYLHIITSESTMKRPQTSSPTGMKRIIL,;
CCDS47894.1, Del, T_7,
(SEQIDNO: 6420)
LDSYSFQSCCLFHCPCKQLRYHFHITCIL,;
CCDS1082.2, Ins, T_7,
(SEQIDNO: 6421)
LHSGDLQPYPTPPPRAVPSLPRLCCLLGA,;
CCDS10271.1, Ins, T_7,
(SEQIDNO: 6422)
LSNRDLHHPVGWHPWPGGQRLDCSPVYTG,;
CCDS2967.1, Ins, T_7,
(SEQIDNO: 6423)
LWPQCIFSSPYFCNCIPGPFSGFHSEVPG,;
CCDS31827.1, Del, T_7,
(SEQIDNO: 6424)
LYFLELPSFTSWPPCLMIVMWPSANPCIT,;
CCDS34730.1, Ins, T_7,
(SEQIDNO: 6425)
NATHRLYCNGIIKIFDDVSDILQSLYSSS,;
CCDS13515.1, Del, T_7,
(SEQIDNO: 6426)
RGKQRAPWTAPRRATVIRTAVWTTSKTAT,;
CCDS9383.1, Del, T_7,
(SEQIDNO: 6427)
RLLLPTHLNQNVQVQVLLFSWMKRDIKKA,;
CCDS13575.1, Ins, T_7,
(SEQIDNO: 6428)
SAGSSGRNSLESSGTSPKICIGKSRTTDE,;
CCDS42696.1, Ins, T_7,
(SEQIDNO: 6430)
YWLPQGQDMHLHSPWRRRAVYGGDRAVPA,;
CCDS43987.1, Del, T_7,
(SEQIDNO: 6431)
FWIELTFFRIQCYPPFGTWDWSYLGLIL,;
CCDS9498.1, Ins, T_7,
(SEQIDNO: 6432)
GLHSFADINARFCKLWSSAFCWKTGQVQ,;
CCDS34081.1, Ins, T_7,
(SEQIDNO: 6433)
LENYSGGASSRQNQHLDLGSQAGTSLPN,;
CCDS5605.1, Del, T_7,
(SEQIDNO: 6436)
LSSFRVSRLGKLARSSPEDCGQWLLKQC,;
CCDS1476.1, Ins, T_7,
(SEQIDNO: 6437)
LVCVLSYGCVASFCFRCRALSRASSSGQ,;
CCDS11685.1, Del, T_7,
(SEQIDNO: 6440)
QFRFLCFWFITLLKMLWFPSNLFQTYIF,;
CCDS34924.1, Ins, T_7,
(SEQIDNO: 6441)
SAIDTVFFITFLHSSVNYLFSFYVASYF,;
CCDS11224.2, Del, T_7,
(SEQIDNO: 6442)
SMIMYSLPLTYSNLHTLTILKKYMLSQN,;
CCDS33544.1, Del, T_7,
(SEQIDNO: 6443)
VIMSITGKKEESNRSKALSEATPFHWIT,;
CCDS4542.1, Ins, T_7,
(SEQIDNO: 6444)
WPDQACHWRPILLTLGCGDHPSEWDCGN,;
CCDS44825.1, Del, T_7,
(SEQIDNO: 6445)
ATRHLDSSGSPSHLAGAYTKITSFGRL,;
CCDS56578.1, Del, T_7,
(SEQIDNO: 6446)
CLSFFKLTLEKMKKFLGSKGGRSTTEG,;
CCDS6132.1, Ins, T_7,
(SEQIDNO: 6448)
CVALRVSVDAEENNRQITKRRCFITSI,;
CCDS5868.1, Ins, T_7,
(SEQIDNO: 6449)
CVVFHVFGLEQCLVCDLAQYLVLCEDY,;
CCDS47063.1, Ins, T_7,
(SEQIDNO: 6450)
FYWEIDIRTTRRKGKAACWPGYIGFLC,;
CCDS34917.1, Ins, T_7,
(SEQIDNO: 6451)
HGFIMVYIINDRNTKAEIPGTQSIYTL,;
CCDS6644.1, Del, T_7,
(SEQIDNO: 6452)
HIQDMNLLVYVAKSFLGISRWLCSFGR,;
CCDS58971.1, Ins, T_7,
(SEQIDNO: 6453)
ICCGAGEGITLHQFEAKSSGEKGFSSI,;
CCDS43473.1, Del, T_7,
(SEQIDNO: 6455)
LFCTFGSQFYQPEAILNQSIDLKDAKK,;
CCDS33471.1, Del, T_7,
(SEQIDNO: 6456)
LKRLFVKMTRKSQQERPVPRRSSDQDS,;
CCDS830.1, Ins, T_7,
(SEQIDNO: 6457)
LLFCGDIYVLLCALANVCFWNIAIWNN,;
CCDS33544.1, Ins, T_7,
(SEQIDNO: 6458)
LLLCPLLGKRRNPTGQRPFQKQLHFIG,;
CCDS35198.1, Del, T_7,
(SEQIDNO: 6459)
PSCTYILHSSPKRSLLGAVNMAGMGTM,;
CCDS13575.1, Del, T_7,
(SEQIDNO: 6462)
SGFLGEKFSGVIWNFSENMYWQVKNNR,;
CCDS11995.1, Ins, T_7,
(SEQIDNO: 6463)
SGSFRSFDEGIVHSKRPSGMDLFNVVQ,;
CCDS5140.1, Ins, T_7,
(SEQIDNO: 6464)
SYFRSAHLHYRNCYGRSWILAPKRTFY,;
CCDS6045.1, Del, T_7,
(SEQIDNO: 6465)
TMILQTLAWWRQEQNVEREWCATMVNV,;
CCDS33379.1, Del, T_7,
(SEQIDNO: 6466)
TPFCTLSAKHVPLSISGSPALELLGPW,;
CCDS11995.1, Del, T_7,
(SEQIDNO: 6467)
TVVIFSTSGFLQPTLIFLKLSWKSTHL,;
CCDS3622.1, Del, T_7,
(SEQIDNO: 6468)
YVSWELQLQSRQMQDYYLIIPNQLLKR,;
CCDS42012.1, Del, T_7,
(SEQIDNO: 6469)
ALHGWWAQLEFFRLLQLSLSAAAVQC,;
CCDS4542.1, Del, T_7,
(SEQIDNO: 6470)
ARSSLSLEANSPYLGVWRPPLRMGLW,;
CCDS11266.1, Ins, T_7,
(SEQIDNO: 6472)
FKDRDNYNREAVTAYLIHIINVTGIG,;
CCDS1916.1, Del, T_7,
(SEQIDNO: 6474)
KILILMKMKGDCLEVKNLSQVKVPEI,;
CCDS3073.1, Ins, T_7,
(SEQIDNO: 6475)
LARPKCTSQGVEVCDFGVSAWRPKSH,;
CCDS1891.2, Ins, T_7,
(SEQIDNO: 6476)
LLRNVLHDQCTMDCGHFLLWRHGGEL,;
CCDS3436.1, Ins, T_7,
(SEQIDNO: 6477)
LPTSLCISYGQWMEEKKRTNGTRWLF,;
CCDS46872.2, Del, T_7,
(SEQIDNO: 6478)
MNFKEQIVKSSLPKPWKKHPVPHPKV,;
CCDS54796.1, Del, T_7,
(SEQIDNO: 6479)
PSKKIDFLYLSRYAIRLRNLADDYHL,;
CCDS58627.1, Ins, T_7,
(SEQIDNO: 6480)
PVYHSQSEEVLFPLLLAYIASSAYFT,;
CCDS5773.1, Ins, T_7,
(SEQIDNO: 6481)
QLDQTNFEERIQTAPGIVRHIPNPFC,;
CCDS41352.1, Del, T_7,
(SEQIDNO: 6482)
SCVFYLERFKKNITDCSKMSPVVLDV,;
CCDS56604.1, Ins, T_7,
(SEQIDNO: 6483)
SEPLCAGLLYTSLDSSNADLPAGTFG,;
CCDS5239.1, Del, T_7,
(SEQIDNO: 6484)
TYWFFFLFFFSFFYFLWILWLITQQV,;
CCDS9393.1, Del, T_7,
(SEQIDNO: 6485)
VIPVIVVLKIKKSMTNTCLNIQNALN,;
CCDS7113.1, Del, T_7,
(SEQIDNO: 6486)
VSVPHSGRVLSAQLMLTNVRFTQEHP,;
CCDS33275.1, Del, T_7,
(SEQIDNO: 6487)
ECLKKQFFIVNTKTSATLDCQPKAY,;
CCDS7256.1, Ins, T_7,
(SEQIDNO: 6488)
FLWHCCRSWMWFIIHCNSDHYVPVF,;
CCDS45263.1, Ins, T_7,
(SEQIDNO: 6489)
FSVKCMAECFSWCYSTKYSLQNQCC,;
CCDS47894.1, Ins, T_7,
(SEQIDNO: 6490)
FWTHTPFRAAASSIAHANNSGITSI,;
CCDS47475.1, Del, T_7,
(SEQIDNO: 6491)
GEVLDRLGVGFMWEESKNLVQRFLD,;
CCDS55176.1, Del, T_7,
(SEQIDNO: 6492)
GEVLDRLGVGFTWEESKNLVQRFLD,;
CCDS11926.2, Del, T_7,
(SEQIDNO: 6493)
ISFGYPRWTLKALVYSQNGVLIWLM,;
CCDS33981.1, Del, T_7,
(SEQIDNO: 6494)
KISSVGLVLVHSITGTASLPVRNAK,;
CCDS41350.1, Del, T_7,
(SEQIDNO: 6495)
LHILSQSILLIQSQSLKKTYDWSGV,;
CCDS35397.1, Del, T_7,
(SEQIDNO: 6496)
MWTSHPRCPDGPQLEQRKGQVHIAM,;
CCDS31591.1, Del, T_7,
(SEQIDNO: 6497)
PSSSTPGSSLSRPAGTPPPGGWTSP,;
CCDS47564.1, Del, T_7,
(SEQIDNO: 6498)
QNRSATIRLSLRVMLSLEILFSGKM,;
CCDS3535.1, Del, T_7,
(SEQIDNO: 6499)
QQLQHPLPHLLQLSLLQLHLLQPHL,;
CCDS42501.1, Del, T_7,
(SEQIDNO: 6500)
RALSGTSRRTRRPSVSSARRLRHWN,;
CCDS7419.1, Del, T_7,
(SEQIDNO: 6501)
RRFFRGWEQLMTVSNKRVQLKHLPV,;
CCDS14628.1, Ins, T_7,
(SEQIDNO: 6502)
SECLGRSPRTQPRPQDEDGIDTQPL,;
CCDS11685.1, Del, T_7,
(SEQIDNO: 6503)
SWKKLNMLLPLKNIAFLKQHWNRFL,;
CCDS1891.2, Del, T_7,
(SEQIDNO: 6504)
TQERATRPVYYGLWTFPSVETRWRT,;
CCDS830.1, Del, T_7,
(SEQIDNO: 6505)
VVLRGHLCSIVRTGKRMFLEHCDLE,;
CCDS5605.1, Ins, T_7,
(SEQIDNO: 6506)
YFLPSGFHVWESWRDPHQKTAVNGF,;
CCDS43436.2, Del, T_7,
(SEQIDNO: 6508)
ATPVANVSAGAPTSIATSLFTIPS,;
CCDS45750.1, Del, T_7,
(SEQIDNO: 6509)
CQLCQVWSLFVEHFLHCMRILCLC,;
CCDS13111.1, Del, T_7,
(SEQIDNO: 6510)
ILFLMKQQSAACFSATEMTLPGMS,;
CCDS4071.2, Del, T_7,
(SEQIDNO: 6511)
KKQLRNFPLCRHIISLLYAFFMPF,;
CCDS34730.1, Ins, T_7,
(SEQIDNO: 6512)
LASFETSGYAYYSTGKRTVKQRCT,;
CCDS31417.1, Del, T_7,
(SEQIDNO: 6513)
LEISPLQISVSLLALSLKCWFTSW,;
CCDS45879.1, Ins, T_7,
(SEQIDNO: 6514)
LTFIRNRYKRTCSSTILERLQAQY,;
CCDS4300.1, Del, T_7,
(SEQIDNO: 6515)
PASFIFSWVPPVTSLWAFLEYCAL,;
CCDS41774.1, Ins, T_7,
(SEQIDNO: 6516)
PNCGYLQEISNSLHCSRAKFNNKC,;
CCDS2222.1, Del, T_7,
(SEQIDNO: 6517)
QSIWYLLQLKPMVKYPPHRFCRCF,;
CCDS1954.1, Del, T_7,
(SEQIDNO: 6519)
RVSALGPRGGGRPGPCSTRPVPTA,;
CCDS5116.1, Ins, T_7,
(SEQIDNO: 6520)
RYGSKSSCVDVFSRKSYQCRLLHS,;
CCDS6069.1, Ins, T_7,
(SEQIDNO: 6521)
YYGWQCMVGNSYHHMVFSSCAKVG,;
CCDS34852.1, Ins, T_7,
(SEQIDNO: 6522)
CCVPYITSSRSFVFWSKRVCLGE,;
CCDS43246.1, Ins, T_7,
(SEQIDNO: 6523)
FHVWRTDSGTQENRERKHNMDSV,;
CCDS33527.2, Ins, T_7,
(SEQIDNO: 6524)
FPRHPQFAFTYFGDCYRRKQRCV,;
CCDS9813.1, Del, T_7,
(SEQIDNO: 6525)
HSFTWGKCLKPITLLWTTLLLHS,;
CCDS46500.1, Del, T_7,
(SEQIDNO: 6526)
KGRMETSSQLPKRLRSLNGPCRL,;
CCDS34209.1, Ins, T_7,
(SEQIDNO: 6527)
LETELGSGICHRYFMPHDALLQL,;
CCDS30769.2, Del, T_7,
(SEQIDNO: 6528)
LETVNVKRKLISVCIILMMKLMK,;
CCDS34475.1, Del, T_7,
(SEQIDNO: 6529)
LFCTFGSQFYQPKRNILSMVAWT,;
CCDS43328.1, Del, T_7,
(SEQIDNO: 6530)
LICFRKFLLKKRKENKNLLKITV,;
CCDS33391.1, Del, T_7,
(SEQIDNO: 6531)
LLHFLEKSPLEEWNQWVMHLCWH,;
CCDS59173.1, Del, T_7,
(SEQIDNO: 6533)
LSLLPPPCTKCIKDGKTTAARSL,;
CCDS43127.1, Ins, T_7,
(SEQIDNO: 6534)
LVDCFNKDGSVRPWRSRSTPQOKK,;
CCDS44221.1, Del, T_7,
(SEQIDNO: 6535)
MLTCTTLSVRPCSVTVWCCRASR,;
CCDS9727.2, Del, T_7,
(SEQIDNO: 6536)
PFSGFLAHLLEESLLRGCFHFLV,;
CCDS9056.1, Ins, T_7,
(SEQIDNO: 6537)
SAANVSKTLANPASTKKSTGIKK,;
CCDS59530.1, Ins, T_7,
(SEQIDNO: 6538)
SQMLFASWHAGVSATLSWRPHSH,;
CCDS7847.1, Del, T_7,
(SEQIDNO: 6539)
SWFSVGPVWPCWSGSSVAPGVCH,;
CCDS7831.1, Del, T_7,
(SEQIDNO: 6540)
VWFSVFPAWSCWSGSSVDPGRCR,;
CCDS7830.1, Del, T_7,
(SEQIDNO: 6541)
VWFSVGPAWSCWSGFSVDPGRCR,;
CCDS9255.2, Ins, T_7,
(SEQIDNO: 6542)
ASIVLQSAQDEYNRGSHIWRSL,;
CCDS43187.1, Ins, T_7,
(SEQIDNO: 6543)
CFFCDFFIYFYIIHHVVSSCLC,;
CCDS103.1, Del, T_7,
(SEQIDNO: 6544)
DLWQLLLFLRAVPPALLIHTKS,;
CCDS33817.1, Ins, T_7,
(SEQIDNO: 6545)
FTCLEHIRVSNYINWHLTCNTY,;
CCDS46856.2, Ins, T_7,
(SEQIDNO: 6547)
GCQQLPLRKCHFSSSQWLQSKC,;
CCDS31866.1, Del, T_7,
(SEQIDNO: 6548)
GTLRRTSNQLRSAGYQQRRQNK,;
CCDS31772.1, Del, T_7,
(SEQIDNO: 6549)
HLLSFFLFLISCLLAKLRLFFP,;
CCDS41769.1, Del, T_7,
(SEQIDNO: 6550)
HLLSFFPFLISCLLAKLRLFFP,;
CCDS10110.1, Del, T_7,
(SEQIDNO: 6551)
HQQIKMERQDQILQDRLWKLKK,;
CCDS35373.1, Del, T_7,
(SEQIDNO: 6552)
KKKMERSTSIKNQSSLASQKFP,;
CCDS9026.1, Ins, T_7,
(SEQIDNO: 6553)
LGTLCGSKNSARQHWCMELHKP,;
CCDS47090.2, Ins, T_7,
(SEQIDNO: 6554)
RDCPWEFVERKEDRQNKEGYRE,;
CCDS46801.1, Ins, T_7,
(SEQIDNO: 6555)
SGSRFSWEVIPSEPESFVSLPV,;
CCDS35126.1, Del, T_7,
(SEQIDNO: 6556)
SLGSRELTSPTLSSSSCSWLFT,;
CCDS33804.1, Del, T_7,
(SEQIDNO: 6557)
YTLDQICLKKEVMIYQLLFYLQ,;
CCDS3828.1, Del, T_7,
(SEQIDNO: 6558)
CVLLGRKNNAIFSSGQKMGQE,;
CCDS33373.1, Ins, T_7,
(SEQIDNO: 6559)
FLATLNQRIPDKETQAFLQKI,;
CCDS5757.1, Ins, T_7,
(SEQIDNO: 6560)
FLIGNSQKSDCFCVFFYLPDN,;
CCDS55599.1, Del, T_7,
(SEQIDNO: 6561)
GEMLRRSSMSQERIILIHMLD,;
CCDS47040.1, Del, T_7,
(SEQIDNO: 6562)
GGGTQDSVWQACRKSQVPLLS,;
CCDS43327.1, Del, T_7,
(SEQIDNO: 6564)
HVALSLMMMISQKQGLMKMKI,;
CCDS9308.2, Del, T_7,
(SEQIDNO: 6565)
IPGKRTCVKNLQELLMIIYQI,;
CCDS1536.1, Del, T_7,
(SEQIDNO: 6566)
KKYCHALSLSFATFGCFGSLP,;
CCDS3793.1, Ins, T_7,
(SEQIDNO: 6567)
LMAHCIQSPPSSRNYCQFHWL,;
CCDS3151.2, Del, T_7,
(SEQIDNO: 6568)
LMWMFPLNQKGMPPVVLLSKI,;
CCDS6940.1, Del, T_7,
(SEQIDNO: 6569)
MFAHSQMRLNSKNAHLPIISF,;
CCDS33337.1, Del, T_7,
(SEQIDNO: 6570)
NFRWWKGLPGLSKVFLTVMHQ,;
CCDS33801.1, Del, T_7,
(SEQIDNO: 6571)
PLHLVELQNVFSWQQWHMIAM,;
CCDS45146.1, Del, T_7,
(SEQIDNO: 6572)
PTASSWLSMTRSFCSSTWCCC,;
CCDS13643.1, Ins, T_7,
(SEQIDNO: 6573)
QSFAAKNISSTFDFIVANNGL,;
CCDS5239.1, Ins, T_7,
(SEQIDNO: 6574)
RHTGFSFCFSSLSSISCGYYG,;
CCDS46801.1, Del, T_7,
(SEQIDNO: 6575)
RISLFLGSHPFRARILCLTPC,;
CCDS5236.2, Ins, T_7,
(SEQIDNO: 6576)
SKFTSLDSAAYCHERCWQFSN,;
CCDS41252.1, Ins, T_7,
(SEQIDNO: 6577)
SKPGFQLLLARGHHERCPFAC,;
CCDS7121.1, Del, T_7,
TR (SEQIDNO: 6578)
SSYILLELLVNFLQYTLPCRM,;
CCDS45002.1, Ins, T_7,
(SEQIDNO: 6579)
TAKRRKPCLCTVSLASTSGKL,;
CCDS55659.1, Del, T_7,
(SEQIDNO: 6580)
VSPAFLNFMDLLLTIKLELCV,;
CCDS865.1, Del, T_7,
(SEQIDNO: 6581)
APTRSPTTSNYRKWRCCVNW,;
CCDS2064.1, Ins, T_7,
(SEQIDNO: 6582)
FFASWITISGCWMAYSDTSL,;
CCDS31401.1, Ins, T_7,
(SEQIDNO: 6583)
FFYDTSFWPKHSPLYPYSFG,;
CCDS1457.1, Ins, T_7,
(SEQIDNO: 6584)
FTGSLLALYGVTIAFIYLPF,;
CCDS34042.1, Del, T_7,
(SEQIDNO: 6585)
IADQSLYHHLIQFAILITQV,;
CCDS43187.1, Del, T_7,
(SEQIDNO: 6586)
IFLYYSSCCIQLPLLTRFFR,;
CCDS56396.1, Ins, T_7,
(SEQIDNO: 6587)
IKIQVSPGTGGRHRIPRGRS,;
CCDS55882.1, Del, T_7,
(SEQIDNO: 6588)
IVSSGPPAPISRDLRVLSQG,;
CCDS47040.1, Ins, T_7,
(SEQIDNO: 6589)
LEAGHRTVYGKLAGNLRFHC,;
CCDS2672.2, Del, T_7,
(SEQIDNO: 6590)
LLTLDMEASLLFFLQRSQHR,;
CCDS34209.1, Del, T_7,
(SEQIDNO: 6591)
MRWIKQMKLRETRANRCSLF,;
CCDS31563.1, Ins, T_7,
(SEQIDNO: 6592)
MSCVHDDSAGKPPHEIGHRDL,;
CCDS53543.1, Del, T_7,
(SEQIDNO: 6593)
NAMLMAQYLMNIVGHFQNQQ,;
CCDS34917.1, Del, T_7,
(SEQIDNO: 6594)
PAALSQSCLRNVWHWPCCGL,;
CCDS10141.1, Del, T_7,
(SEQIDNO: 6595)
QIHKYRSTKIQIPIAGLFYI,;
CCDS30855.1, Del, T_7,
(SEQIDNO: 6596)
WIAEVWPWCWQSASSPSSPQ,;
CCDS30735.1, Del, T_7,
(SEQIDNO: 6597)
AFYLASVLKKASKERGLCC,;
CCDS32064.1, Ins, T_7,
(SEQIDNO: 6599)
FTWFAWCHNAYYGFYCSSW,;
CCDS55189.1, Del, T_7,
(SEQIDNO: 6600)
GAEKATIFKVPRLAPALPI,;
CCDS4642.1, Del, T_7,
(SEQIDNO: 6601)
LPIYHSWIFVTPHVQSHKC,;
CCDS41634.1, Ins, T_7,
(SEQIDNO: 6602)
LQRNRYVSFWLEIKDIGRA,;
CCDS45501.1, Del, T_7,
(SEQIDNO: 6603)
LSIYGTGRYHLFLIITIFV,;
CCDS11900.1, Ins, T_7,
(SEQIDNO: 6604)
LTSDSNAPEAAAGICVLCH,;
CCDS55321.1, Del, T_7,
(SEQIDNO: 6606)
MNLTREPSRVLKSLWKEWH,;
CCDS46252.1, Del, T_7,
(SEQIDNO: 6607)
PRSETLSKAQIINSAATSP,;
CCDS2363.1, Ins, T_7,
(SEQIDNO: 6608)
SIQLGPFSCQLLLLQPINF,;
CCDS31378.1, Ins, T_7,
(SEQIDNO: 6609)
SVLSLPCSFTCILPSPGCH,;
CCDS41629.1, Del, T_7,
(SEQIDNO: 6610)
TGTAPALMPSCIIINQEAA,;
CCDS11021.1, Ins, T_7,
(SEQIDNO: 6611)
VHLPHHTDWKSAHHLGHLC,;
CCDS32024.1, Del, T_7,
(SEQIDNO: 6612)
VIFLESPNLPAWTLTSLKY,;
CCDS9026.1, Del, T_7,
(SEQIDNO: 6613)
WNSLWVKEFGEAALVYGIT,;
CCDS449.1, Ins, T_7,
(SEQIDNO: 6614)
YLCLAVHISCVSGSCHNLC,;
CCDS7593.1, Ins, T_7,
(SEQIDNO: 6615)
YQLPARVKVCQQLSKGKLR,;
CCDS6204.1, Ins, T_7,
(SEQIDNO: 6616)
YSWSKCRTRINSPTDRSQH,;
CCDS58789.1, Ins, T_7,
(SEQIDNO: 6617)
CCPKPILEFTNWGYIPQH,;
CCDS3598.1, Ins, T_7,
(SEQIDNO: 6618)
CKQSIWIFAGSAASSDYW,;
CCDS34342.1, Ins, T_7,
(SEQIDNO: 6619)
CVWTGLVILLSGENQPAL,;
CCDS44717.1, Del, T_7,
(SEQIDNO: 6620)
DQSSITSHIEFSKTCILS,;
CCDS58079.1, Ins, T_7,
(SEQIDNO: 6621)
FDPRKLDCWGKRCQGPKV,;
CCDS33799.1, Ins, T_7,
(SEQIDNO: 6622)
FHCNWRNHRMFSLGNNGI,;
CCDS33801.1, Ins, T_7,
(SEQIDNO: 6623)
FLCIWWNYRMFSLGNNGI,;
CCDS58463.1, Ins, T_7,
(SEQIDNO: 6624)
FLGGWIWSIDCICQLQQI,;
CCDS33800.1, Ins, T_7,
(SEQIDNO: 6625)
FPCNHCNHRMFSLGNNGI,;
CCDS45984.2, Ins, T_7,
(SEQIDNO: 6626)
FSQFVKKTREKSHWRETL,;
CCDS13171.1, Ins, T_7,
(SEQIDNO: 6627)
FSQGARLLQGHREHADAP,;
CCDS33797.1, Ins, T_7,
(SEQIDNO: 6628)
FVCNQCNHGMFSLGNDGI,;
CCDS31220.1, Del, T_7,
(SEQIDNO: 6629)
GAIGCCQPMLLRHGIYLN,;
CCDS34071.1, Ins, T_7,
(SEQIDNO: 6630)
GWLCSNRKLEIQRCITCF,;
CCDS31715.1, Ins, T_7,
(SEQIDNO: 6631)
ILRCCDHHISSVAFPASW,;
CCDS7980.1, Del, T_7,
(SEQIDNO: 6632)
LFLECCQLYLKGEMQHIW,;
CCDS9300.2, Del, T_7,
(SEQIDNO: 6633)
LKCFFQIFKKLKQNLEIL,;
CCDS865.1, Ins, T_7,
(SEQIDNO: 6634)
LLLLGAPLHQTTESGGAV,;
CCDS31506.1, Del, T_7,
(SEQIDNO: 6635)
LPSCPFWMSCSHLSLPPR,;
CCDS10034.1, Del, T_7,
(SEQIDNO: 6636)
LRFLRTMKQWPKFCSAGI,;
CCDS12713.1, Ins, T_7,
(SEQIDNO: 6637)
LSVIPYETYENSHWRETV,;
CCDS31373.1, Del, T_7,
(SEQIDNO: 6638)
PCWQPQTLHLTPAFFPKC,;
CCDS5757.1, Del, T_7,
(SEQIDNO: 6639)
PHWKLPKIRLLLRVFLFA,;
CCDS3622.1, Ins, T_7,
(SEQIDNO: 6640)
PMSLGNCSCNPDKCKIII,;
CCDS5147.1, Del, T_7,
(SEQIDNO: 6641)
QALIQFRELGVKTYFRPS,;
CCDS3114.1, Del, T_7,
(SEQIDNO: 6642)
RLYLCLFKKKVMGLFIVV,;
CCDS9303.1, Del, T_7,
(SEQIDNO: 6643)
SEQTNHIRIAISLSVEAD,;
CCDS31772.1, Del, T_7,
(SEQIDNO: 6644)
TSFIIQKQDLCFLLFLHI,;
CCDS41769.1, Del, T_7,
(SEQIDNO: 6645)
TSFIIQKQDLCFLLFLRI,;
CCDS10314.1, Ins, T_7,
(SEQIDNO: 6648)
CRPWKQIGRADPHFQGP,;
CCDS31827.1, Ins, T_7,
(SEQIDNO: 6649)
CYISWSYRVLPPGLHVL,;
CCDS53879.1, Ins, T_7,
(SEQIDNO: 6650)
FFSGWGKFALFIHSIPET,;
CCDS33391.1, Ins, T_7,
(SEQIDNO: 6651)
FFSTSWRRAHWKSGTSG,;
CCDS5688.1, Ins, T_7,
(SEQIDNO: 6652)
FHCPRPSGSGSLCLLLL,;
CCDS13133.1, Del, T_7,
(SEQIDNO: 6653)
GLLVRIAQQMARSSMKG,;
CCDS7113.1, Ins, T_7,
(SEQIDNO: 6654)
HGWIQAIWRLHCFLYLQ,;
CCDS34120.1, Del, T_7,
(SEQIDNO: 6655)
HMPRKHFTRQSTGTIAY,;
CCDS700.1, Del, T_7,
(SEQIDNO: 6656)
IIGATLILSMTGQEQSL,;
CCDS32235.1, Del, T_7,
(SEQIDNO: 6657)
KPSRIMMNLEVQDEPLA,;
CCDS2595.1, Del, T_7,
(SEQIDNO: 6658)
KTRTVMKSTYLDSLSVN,;
CCDS11036.1, Del, T_7,
(SEQIDNO: 6659)
KTTSSSLCWNLSLEGLT,;
CCDS31825.1, Ins, T_7,
(SEQIDNO: 6660)
LHILGGYRIFPSSCSVL,;
CCDS55845.1, Del, T_7,
(SEQIDNO: 6663)
LYPSLLNQSPCLELLKV,;
CCDS34475.1, Ins, T_7,
(SEQIDNO: 6664)
LYSALLGHNFTSQKEIS,;
CCDS34535.1, Del, T_7,
(SEQIDNO: 6665)
MKLEEILGNAALMMTLT,;
CCDS2223.2, Del, T_7,
(SEQIDNO: 6666)
NAVRKSETKLQVPLQPL,;
CCDS43218.1, Del, T_7,
(SEQIDNO: 6667)
NPEFVSFFQASRCWITR,;
CCDS11685.1, Ins, T_7,
(SEQIDNO: 6668)
PLWIIICIFCFNADTSF,;
CCDS5843.1, Del, T_7,
(SEQIDNO: 6669)
PMLLSPLVRLLQPSICQ,;
CCDS2154.1, Del, T_7,
(SEQIDNO: 6670)
QCMERRLVNLIPLRLFY,;
CCDS6047.1, Del, T_7,
(SEQIDNO: 6671)
QKSTCRSILKTRRRLSC,;
CCDS1082.2, Del, T_7,
(SEQIDNO: 6673)
TFWRPSTLSDTSSSCCS,;
CCDS10091.1, Ins, T_7,
(SEQIDNO: 6674)
YGDGIQKTLCYGICEVL,;
CCDS1842.1, Ins, T_7,
(SEQIDNO: 6675)
CHLSCLQSTSYHSNQL,;
CCDS2129.1, Ins, T_7,
(SEQIDNO: 6676)
CTLFYIRFKIPVLWEN,;
CCDS8677.1, Ins, T_7,
(SEQIDNO: 6677)
CWIWSYSFHGLQVAEK,;
CCDS14188.1, Ins, T_7,
(SEQIDNO: 6678)
DLLQEWSPLREEPVCF,;
CCDS2073.1, Ins, T_7,
(SEQIDNO: 6679)
FIPGGEKISKCFLPGG,;
CCDS9815.2, Ins, T_7,
(SEQIDNO: 6680)
FSHHVFSLWKERCSSL,;
CCDS34209.1, Del, T_7,
(SEQIDNO: 6681)
GDRIGIWDLSQIFYAT,;
CCDS8718.1, Ins, T_7,
(SEQIDNO: 6682)
HKRKPIKRAEPSRQSF,;
CCDS3459.1, Ins, T_7,
(SEQIDNO: 6683)
HYGVCDDYFDHSKSGL,;
CCDS34064.1, Del, T_7,
(SEQIDNO: 6684)
ISRFGPGLMEPSMQNS,;
CCDS47270.1, Del, T_7,
(SEQIDNO: 6685)
KKSRRKKKMVLICPLS,;
CCDS1404.1, Del, T_7,
(SEQIDNO: 6686)
KPQICPMILRTLSCTG,;
CCDS3646.1, Del, T_7,
(SEQIDNO: 6687)
LCSWELFSSWSSLPEF,;
CCDS31772.1, Del, T_7,
(SEQIDNO: 6688)
LFLISCLLAKLRLFFP,;
CCDS47082.1, Del, T_7,
(SEQIDNO: 6690)
LQSHVPKSCLSRRESM,;
CCDS31005.1, Ins, T_7,
(SEQIDNO: 6691)
LVCVLSYGCVASFCFR,;
CCDS43473.1, Ins, T_7,
(SEQIDNO: 6692)
LYSALLGHNFTSQKQF,;
CCDS4981.1, Del, T_7,
(SEQIDNO: 6693)
MATSSHRFLEDMLPAK,;
CCDS41769.1, Del, T_7,
(SEQIDNO: 6694)
PFLISCLLAKLRLFFP,;
CCDS34355.1, Del, T_7,
(SEQIDNO: 6695)
QPLCLQTQLAQNCMKL,;
CCDS11921.1, Del, T_7,
(SEQIDNO: 6696)
RPLQPSDSVLMMLFMA,;
CCDS6359.2, Ins, T_7,
(SEQIDNO: 6698)
SGSGKPAASRDDAPQR,;
CCDS34975.1, Ins, T_7,
(SEQIDNO: 6699)
SIAHAQFPGRVRRALL,;
CCDS53944.1, Ins, T_7,
(SEQIDNO: 6700)
STRRTDLEQRNSLLLL,;
CCDS11965.1, Ins, T_7,
(SEQIDNO: 6701)
STRWKPCLNMWFLVE,;
CCDS31514.1, Ins, T_7,
(SEQIDNO: 6702)
SYAWRHGVSPSDSDGL,;
CCDS31880.1, Ins, T_7,
(SEQIDNO: 6703)
VFGLSSYGNQPSKSLL,;
CCDS8294.1, Del, T_7,
(SEQIDNO: 6704)
VVMEKVDTTIMTLLQI,;
CCDS9933.1, Del, T_7,
(SEQIDNO: 6705)
WRAQTIILSLLPVMVL,;
CCDS47564.1, Ins, T_7,
(SEQIDNO: 6706)
FRTGQPPSAYLCVSC,;
CCDS32033.1, Ins, T_7,
(SEQIDNO: 6707)
FTGYNRVFLFISYGL,;
CCDS34701.1, Ins, T_7,
(SEQIDNO: 6708)
GRARGLGWDVEGGGR,;
CCDS55514.1, Del, T_7,
(SEQIDNO: 6709)
HLNKGRRLGDKIRAT,;
CCDS2987.1, Ins, T_7,
(SEQIDNO: 6710)
HLPVGCSFHSVHQHL,;
CCDS32064.1, Del, T_7,
(SEQIDNO: 6711)
HLVCLVPQCLLWILL,;
CCDS4996.1, Del, T_7,
(SEQIDNO: 6712)
IVLDYFLFLQMLPCL,;
CCDS42374.1, Del, T_7,
(SEQIDNO: 6713)
IVQLLIGHSLLLQKL,;
CCDS43187.1, Ins, T_7,
(SEQIDNO: 6714)
IYFYIIHHVVSSCLC,;
CCDS55377.1, Del, T_7,
(SEQIDNO: 6715)
KHLLCFRILPWRTSL,;
CCDS33237.1, Ins, T_7,
(SEQIDNO: 6716)
LAPLFPGPVRPGQVF,;
CCDS3244.1, Del, T_7,
(SEQIDNO: 6717)
LERVKLLIIPASMKK,;
CCDS55659.1, Ins, T_7,
(SEQIDNO: 6718)
LFLQLFSISWTYYSL,;
CCDS43436.2, Ins, T_7,
(SEQIDNO: 6719)
LLHLWQMFQQALLPL,;
CCDS54771.1, Del, T_7,
(SEQIDNO: 6720)
LLMMMTTSREMPSLN,;
CCDS14021.1, Del, T_7,
(SEQIDNO: 6721)
LMPPRLCLNLRVKMS,;
CCDS43700.1, Ins, T_7,
(SEQIDNO: 6722)
LPFWDRPAAQTTLWI,;
CCDS9815.2, Del, T_7,
(SEQIDNO: 6723)
LPSCLLPLERKVLIS,;
CCDS3949.1, Del, T_7,
(SEQIDNO: 6724)
LVRSQLLEKFLQLRF,;
CCDS3776.1, Del, T_7,
(SEQIDNO: 6725)
MHLYLELCRFSTGGV,;
CCDS31669.1, Del, T_7,
(SEQIDNO: 6726)
PRLFSVRDKKRALQV,;
CCDS2119.1, Del, T_7,
(SEQIDNO: 6727)
QMLKVTLLLAQQIQL,;
CCDS47069.1, Del, T_7,
(SEQIDNO: 6728)
QTAESATVRMEYIFS,;
CCDS45621.1, Ins, T_7,
(SEQIDNO: 6729)
SHPSAATKYEPGSYI,;
CCDS4125.1, Del, T_7,
(SEQIDNO: 6730)
SNLEKVLNNHLLRPV,;
CCDS33402.1, Del, T_7,
(SEQIDNO: 6731)
TYFFRIAGVCLMTEN,;
CCDS5636.1, Del, T_7,
(SEQIDNO: 6732)
VDSSSYHPFKINQNI,;
CCDS47445.1, Del, T_7,
(SEQIDNO: 6733)
VIVNLSTMGPSVNLM,;
CCDS4987.1, Ins, T_7,
(SEQIDNO: 6734)
WIRSARENIRIGVSY,;
CCDS46932.1, Del, T_7,
(SEQIDNO: 6737)
ASWLTSCYFFLEEK,;
CCDS9056.1, Del, T_7,
(SEQIDNO: 6738)
CCKCLQNIGKSSKH,;
CCDS5868.1, Del, T_7,
(SEQIDNO: 6739)
CCVSCFWTRAVSGL,;
CCDS31772.1, Ins, T_7,
(SEQIDNO: 6741)
FIYSLFFFSSSPVS,;
CCDS41769.1, Ins, T_7,
(SEQIDNO: 6742)
FIYSLFFLSSSPVS,;
CCDS34867.1, Ins, T_7,
(SEQIDNO: 6743)
FRNHLLYFGCKIQP,;
CCDS10141.1, Ins, T_7,
(SEQIDNO: 6744)
FRYTNTGAPRSKFL,;
CCDS14470.1, Ins, T_7,
(SEQIDNO: 6745)
GRTGRCHRRICFQT,;
CCDS11583.1, Del, T_7,
(SEQIDNO: 6746)
KQRKGTSCQFQDII,;
CCDS35397.1, Ins, T_7,
(SEQIDNO: 6747)
LCGQATPGAQMVPN,;
CCDS33268.1, Del, T_7,
(SEQIDNO: 6748)
LKKKMLSLKNILLN,;
CCDS9717.1, Ins, T_7,
(SEQIDNO: 6749)
LLPIWHDLCFGELL,;
CCDS55882.1, Ins, T_7,
(SEQIDNO: 6750)
LLSPLGPQLPSPGT,;
CCDS4124.1, Del, T_7,
(SEQIDNO: 6751)
LTFYIISSEKITPW,;
CCDS5678.1, Ins, T_7,
(SEQIDNO: 6752)
LVESISIFSHSTSD,;
CCDS7113.1, Ins, T_7,
(SEQIDNO: 6753)
LYLSPTVEGSSLLS,;
CCDS45002.1, Ins, T_7,
(SEQIDNO: 6754)
LYYKPSAFKNSTSN,;
CCDS54430.1, Del, T_7,
(SEQIDNO: 6755)
NIIILKEEDNQKKN,;
CCDS9987.2, Del, T_7,
(SEQIDNO: 6756)
QCLSGSISMDIGTK,;
CCDS45485.1, Del, T_7,
(SEQIDNO: 6757)
QTWKKNHLTQTTLK,;
CCDS11887.1, Del, T_7,
(SEQIDNO: 6758)
RNGTSLPSHHSWNS,;
CCDS31416.1, Del, T_7,
(SEQIDNO: 6759)
SATCLWLTSVSLPT,;
CCDS1661.1, Ins, T_7,
(SEQIDNO: 6760)
SGWTQSRGKPQTFH,;
CCDS33677.1, Del, T_7,
(SEQIDNO: 6761)
SLPETALKQYACTV,;
CCDS53545.1, Del, T_7,
(SEQIDNO: 6762)
TARPVMMTSQIPKE,;
CCDS41805.1, Del, T_7,
(SEQIDNO: 6763)
TLSLYGHLYMRVLP,;
CCDS58294.1, Del, T_7,
(SEQIDNO: 6764)
VLWKASGTIQFNCK,;
CCDS58683.1, Ins, T_7,
(SEQIDNO: 6765)
VPGFNGDAYDVSHL,;
CCDS9697.1, Ins, T_7,
(SEQIDNO: 6767)
WNIFNKYSEDRRRE,;
CCDS14487.1, Del, T_7,
(SEQIDNO: 6769)
YSKSLEFVLRKSKH,;
CCDS43455.1, Ins, T_7,
(SEQIDNO: 6770)
ASCLSDGFLPASA,;
CCDS4902.1, Ins, T_7,
(SEQIDNO: 6771)
CSSGAAAKSSFEE,;
CCDS46446.1, Ins, T_7,
(SEQIDNO: 6773)
FFILKRRLFCSTL,;
CCDS2325.1, Ins, T_7,
(SEQIDNO: 6774)
FPVWVCERSEDCK,;
CCDS3535.1, Ins, T_7,
(SEQIDNO: 6775)
FSSCSTRCPTYCS,;
CCDS47406.1, Del, T_7,
(SEQIDNO: 6776)
FTTLRFSSDCRRS,;
CCDS4966.1, Del, T_7,
(SEQIDNO: 6777)
GTQMLNIRTNIEV,;
CCDS4048.1, Ins, T_7,
(SEQIDNO: 6778)
GWVLFKWIWYPEQ,;
CCDS11685.1, Ins, T_7,
(SEQIDNO: 6779)
HSSDFYVFGSSLF,;
CCDS41252.1, Del, T_7,
(SEQIDNO: 6780)
KTWISAPPGKRSS,;
CCDS45501.1, Ins, T_7,
(SEQIDNO: 6781)
LCLYMALGVTTYS,;
CCDS8677.1, Del, T_7,
(SEQIDNO: 6782)
LDMELLFPWLTGC,;
CCDS664.1, Del, T_7,
(SEQIDNO: 6783)
LHCILQRTMDMNR,;
CCDS34640.1, Ins, T_7,
(SEQIDNO: 6785)
LQECRRERKTRES,;
CCDS2955.1, Del, T_7,
(SEQIDNO: 6786)
LRHSVKKKVLVRL,;
CCDS2955.1, Del, T_7,
(SEQIDNO: 6787)
LSISYHQNWKNLH,;
CCDS12216.2, Del, T_7,
(SEQIDNO: 6789)
PGNQSALLKKRQR,;
CCDS7593.1, Del, T_7,
(SEQIDNO: 6790)
PTASQSQGLSAAV,;
CCDS54360.1, Ins, T_7,
(SEQIDNO: 6791)
PVQDNIPRWINSI,;
CCDS5756.1, Ins, T_7,
(SEQIDNO: 6792)
RDISNSSNWKQDG,;
CCDS1790.1, Ins, T_7,
(SEQIDNO: 6793)
SKLSQVVRKTSSN,;
CCDS42319.1, Ins, T_7,
(SEQIDNO: 6795)
VLFCFGGDRLTLH,;
CCDS33379.1, Ins, T_7,
(SEQIDNO: 6796)
VPLFAHCQQNTSL,;
CCDS4658.1, Del, T_7,
(SEQIDNO: 6797)
WETFLVWIFLILQ,;
CCDS31504.1, Ins, T_7,
(SEQIDNO: 6798)
WRHRDLHSHRDGL,;
CCDS10091.1, Del, T_7,
(SEQIDNO: 6799)
WRWNTKNSLLWNL,;
CCDS41326.1, Ins, T_7,
(SEQIDNO: 6800)
WRYSGGALWAGDQ,;
CCDS2415.1, Ins, T_7,
(SEQIDNO: 6801)
WTPYNHYGLDLWL,;
CCDS46227.1, Ins, T_7,
(SEQIDNO: 6802)
YAKRSRLFEQVGW,;
CCDS6649.1, Ins, T_7,
(SEQIDNO: 6803)
YALFFQLCTQQMF,;
CCDS6262.1, Ins, T_7,
(SEQIDNO: 6804)
YFFVKFKSWWCRT,;
CCDS3949.1, Ins, T_7,
(SEQIDNO: 6805)
YWSDHSCWKSSSS,;
CCDS41634.1, Del, T_7,
(SEQIDNO: 6806)
AKKQICLILVGD,;
CCDS1620.1, Del, T_7,
(SEQIDNO: 6808)
AVQILLTVYQTK,;
CCDS54774.1, Ins, T_7,
(SEQIDNO: 6809)
CDKKCQSCCLHL,;
CCDS45021.1, Ins, T_7,
(SEQIDNO: 6810)
CGNWHCPNFYPL,;
CCDS45060.1, Del, T_7,
(SEQIDNO: 6811)
CGSIIILLEIHY,;
CCDS6132.1, Del, T_7,
(SEQIDNO: 6812)
CGSSCVRGCGGK,;
CCDS6316.2, Ins, T_7,
(SEQIDNO: 6813)
CTYICRIWILSL,;
CCDS14485.1, Ins, T_7,
(SEQIDNO: 6814)
EFYSRGKWWRLW,;
CCDS5236.2, Del, T_7,
(SEQIDNO: 6815)
EIYLIGFSSILP,;
CCDS47554.1, Ins, T_7,
(SEQIDNO: 6816)
FLITLWWTWGGQ,;
CCDS10322.1, Del, T_7,
(SEQIDNO: 6817)
FLVPLAIIMALQ,;
CCDS2194.1, Ins, T_7,
(SEQIDNO: 6818)
FQTCKYTYHCCS,;
CCDS5685.1, Ins, T_7,
(SEQIDNO: 6819)
GCGREIVCTDSI,;
CCDS47430.1, Ins, T_7,
(SEQIDNO: 6820)
GKCYHPDVSNTK,;
CCDS56596.1, Ins, T_7,
(SEQIDNO: 6821)
GSPNPFLYRQRK,;
CCDS11021.1, Del, T_7,
(SEQIDNO: 6822)
IMVQRWACISAL,;
CCDS13662.1, Ins, T_7,
(SEQIDNO: 6823)
KGVQILERKCTI,;
CCDS43663.1, Ins, T_7,
(SEQIDNO: 6824)
LGELPCISRIFN,;
CCDS46446.1, Del, T_7,
(SEQIDNO: 6825)
LHPQKETLLLNI,;
CCDS33773.1, Del, T_7,
(SEQIDNO: 6826)
LRHSSTGHTLFE,;
CCDS41826.1, Ins, T_7,
(SEQIDNO: 6827)
LSESNSVFQSFH,;
CCDS9297.1, Del, T_7,
(SEQIDNO: 6828)
LTLKIKIFIGKM,;
CCDS9743.1, Del, T_7,
(SEQIDNO: 6829)
MAFEQNLPHTQV,;
CCDS45065.1, Del, T_7,
(SEQIDNO: 6830)
MRRLEERWENKL,;
CCDS33527.2, Del, T_7,
(SEQIDNO: 6831)
PKASTVCFYLFW,;
CCDS46718.1, Del, T_7,
(SEQIDNO: 6832)
PSATRCMGSRQW,;
CCDS42656.1, Del, T_7,
(SEQIDNO: 6834)
QWMTCFLYSQFH,;
CCDS56604.1, Del, T_7,
(SEQIDNO: 6835)
RASVCWVTVYFP,;
CCDS45880.1, Ins, T_7,
(SEQIDNO: 6836)
SASDSICKWTGT,;
CCDS33773.1, Ins, T_7,
(SEQIDNO: 6837)
SHCAQTDSTRVF,;
CCDS8667.1, Del, T_7,
(SEQIDNO: 6838)
SKCSKFLRRCNL,;
CCDS6710.2, Ins, T_7,
(SEQIDNO: 6839)
SLSQAGHRFWIC,;
CCDS59173.1, Ins, T_7,
(SEQIDNO: 6840)
SSPSYPHPVQNA,;
CCDS6160.1, Ins, T_7,
(SEQIDNO: 6841)
SWVYPQISGLSL,;
CCDS56606.1, Del, T_7,
(SEQIDNO: 6842)
THCLLVSSRSIC,;
CCDS6463.1, Ins, T_7,
(SEQIDNO: 6843)
WPCSHLFNSWSD,;
CCDS13072.1, Ins, T_7,
(SEQIDNO: 6844)
WSLLSSYWLYHF,;
CCDS2293.1, Ins, T_7,
(SEQIDNO: 6845)
YDSCYSRIRRES,;
CCDS8435.1, Ins, T_7,
(SEQIDNO: 6846)
YTIRVSSHMARR,;
CCDS5729.1, Ins, T_7,
(SEQIDNO: 6847)
CLEAWRIKIPK,;
CCDS58048.1, Ins, T_7,
(SEQIDNO: 6848)
CLFALLAQCLC,;
CCDS9987.2, Ins, T_7,
(SEQIDNO: 6849)
CNAFPAASRWI,;
CCDS6308.1, Del, T_7,
(SEQIDNO: 6850)
ECWFQQQIEML,;
CCDS748.1, Ins, T_7,
(SEQIDNO: 6851)
FFKGRYPYFRE,;
CCDS9617.1, Ins, T_7,
(SEQIDNO: 6852)
FFPKVHPVYLC,;
CCDS2119.1, Ins, T_7,
(SEQIDNO: 6853)
FIFYCNSPMPL,;
CCDS3707.1, Ins, T_7,
(SEQIDNO: 6855)
FLYLGHIHFNL,;
CCDS31880.1, Del, T_7,
(SEQIDNO: 6856)
FWSIKLWKPTK,;
CCDS59106.1, Del, T_7,
G
MRVVNTLGHY,;
CCDS3499.1, Ins, T_7,
(SEQIDNO: 6858)
GVCIFCTIYKP,;
CCDS664.1, Ins, T_7,
(SEQIDNO: 6860)
HSIAYCSVLWT,;
CCDS5907.1, Ins, T_7,
(SEQIDNO: 6861)
HYFSVHLSLHL,;
CCDS55124.1, Del, T_7,
(SEQIDNO: 6862)
ITITLKIFLLT,;
CCDS861.1, Del, T_7,
(SEQIDNO: 6863)
KDCVLLGCFFS,;
CCDS6281.1, Ins, T_7,
(SEQIDNO: 6864)
KEDKKCTQFGT,;
CCDS33351.2, Del, T_7,
(SEQIDNO: 6865)
KNMIGVKYKSY,;
CCDS13261.1, Del, T_7,
(SEQIDNO: 6866)
KSWILWKIVFI,;
CCDS1576.1, Ins, T_7,
(SEQIDNO: 6868)
LCLEYFISKSI,;
CCDS56326.1, Ins, T_7,
(SEQIDNO: 6869)
LCQCHLPAVLL,;
CCDS10202.1, Del, T_7,
(SEQIDNO: 6870)
LCYLKQTQRKA,;
CCDS42654.1, Ins, T_7,
(SEQIDNO: 6871)
LGRKRYYGLCQ,;
CCDS34119.1, Ins, T_7,
(SEQIDNO: 6872)
LHHSLCLRYHL,;
CCDS53879.1, Del, T_7,
(SEQIDNO: 6873)
LLRLGEICIAS,;
CCDS44322.1, Del, T_7,
(SEQIDNO: 6874)
LMTCFKPVWFI,;
CCDS9376.1, Ins, T_7,
(SEQIDNO: 6875)
LPLCSCLSFLP,;
CCDS13171.1, Del, T_7,
(SEQIDNO: 6876)
LPRSQTASRTS,;
CCDS11887.1, Del, T_7,
(SEQIDNO: 6877)
LTWPSLTSLWV,;
CCDS6160.1, Del, T_7,
(SEQIDNO: 6878)
LVMVMVWIRLL,;
CCDS1284.1, Del, T_7,
(SEQIDNO: 6879)
LVSGLSFVSLY,;
CCDS5636.1, Ins, T_7,
(SEQIDNO: 6880)
LWTPHLIIHSR,;
CCDS41939.1, Del, T_7,
(SEQIDNO: 6881)
NLCVWVTLKAI,;
CCDS4991.1, Del, T_7,
(SEQIDNO: 6882)
NPRKATQSFHF,;
CCDS35089.1, Del, T_7,
(SEQIDNO: 6883)
PICSSSTPSCK,;
CCDS13642.1, Del, T_7,
(SEQIDNO: 6884)
PLETCATSYCR,;
CCDS2505.1, Del, T_7,
(SEQIDNO: 6885)
QIAGVCLKTKN,;
CCDS2506.1, Del, T_7,
(SEQIDNO: 6886)
QIAGVCLMTEN,;
CCDS11983.1, Del, T_7,
(SEQIDNO: 6887)
QYLPLILFLSG,;
CCDS33402.1, Del, T_7,
(SEQIDNO: 6888)
RIAGVCLMTEN,;
CCDS41963.1, Del, T_7,
(SEQIDNO: 6889)
SFQKKLMKNPP,;
CCDS41878.1, Del, T_7,
(SEQIDNO: 6891)
SSILIKMFAYW,;
CCDS3077.1, Ins, T_7,
(SEQIDNO: 6892)
SYYVHEAKSSV,;
CCDS34439.1, Del, T_7,
(SEQIDNO: 6893)
TSSRTPPSASW,;
CCDS47005.1, Ins, T_7,
(SEQIDNO: 6896)
VFLTSIHSVAL,;
CCDS31502.1, Del, T_7,
(SEQIDNO: 6897)
VSTWEHCWVIC,;
CCDS7846.1, Del, T_7,
(SEQIDNO: 6898)
VWFSVGPAWSC,;
CCDS47246.1, Del, T_7,
(SEQIDNO: 6899)
WNYMKLLLEQQ,;
CCDS7130.1, Ins, T_7,
(SEQIDNO: 6900)
YCKICKMQKHI,;
CCDS31591.1, Ins, T_7,
(SEQIDNO: 6902)
CLLHLLLVLH,;
CCDS8961.1, Ins, T_7,
(SEQIDNO: 6903)
CPHYILGSIC,;
CCDS41326.1, Del, T_7,
(SEQIDNO: 6904)
EILRRSSLGR,;
CCDS3671.1, Ins, T_7,
(SEQIDNO: 6905)
ESTRFLAFKE,;
CCDS2093.1, Del, T_7,
(SEQIDNO: 6906)
FFTLCMRSLS,;
CCDS4902.1, Del, T_7,
(SEQIDNO: 6907)
FKWSSGKILI,;
CCDS9336.1, Ins, T_7,
(SEQIDNO: 6908)
FLLSIKCFSK,;
CCDS11685.1, Del, T_7,
(SEQIDNO: 6909)
FMDYHLYFLL,;
CCDS7980.1, Ins, T_7,
(SEQIDNO: 6911)
FYFWNVVNYI,;
CCDS7419.1, Ins, T_7,
(SEQIDNO: 6912)
GEGSSVAGSN,;
CCDS31373.1, Ins, T_7,
(SEQIDNO: 6913)
GHVGSHRHCT,;
CCDS12315.1, Del, T_7,
(SEQIDNO: 6915)
KRWIRKIKCI,;
CCDS47430.1, Del, T_7,
(SEQIDNO: 6916)
KVLSPRCFEH,;
CCDS31514.1, Del, T_7,
(SEQIDNO: 6917)
LCLEARSVSF,;
CCDS31028.1, Ins, T_7,
(SEQIDNO: 6918)
LEVFAWRKLH,;
CCDS5907.1, Del, T_7,
(SEQIDNO: 6919)
LFFCSSFITF,;
CCDS5933.1, Del, T_7,
(SEQIDNO: 6920)
LLEKVGLNFV,;
CCDS41943.1, Ins, T_7,
(SEQIDNO: 6921)
LPDCNLPGNS,;
CCDS45955.1, Del, T_7,
(SEQIDNO: 6922)
LVFWTPSCTI,;
CCDS31162.2, Del, T_7,
(SEQIDNO: 6924)
LVWLKCTFQT,;
CCDS8132.1, Del, T_7,
(SEQIDNO: 6925)
LWTQPTWPRS,;
CCDS13261.1, Del, T_7,
(SEQIDNO: 6926)
MGSVLMQCIC,;
CCDS2602.1, Ins, T_7,
(SEQIDNO: 6927)
PGDSSGAVHK,;
CCDS31083.1, Del, T_7,
(SEQIDNO: 6928)
QEAIPSEGFK,;
CCDS9159.1, Ins, T_7,
(SEQIDNO: 6929)
QLGSKRQGRF,;
CCDS2200.1, Ins, T_7,
(SEQIDNO: 6930)
SCNFLRRGIL,;
CCDS45955.1, Del, T_7,
(SEQIDNO: 6931)
SFLHVWMTCS,;
CCDS56026.1, Del, T_7,
(SEQIDNO: 6932)
TEQNLVIKKN,;
CCDS14428.1, Del, T_7,
(SEQIDNO: 6933)
TKFEMQYLAR,;
CCDS55317.1, Del, T_7,
(SEQIDNO: 6934)
TQTPDKVSKP,;
CCDS7335.1, Del, T_7,
(SEQIDNO: 6935)
TQTWGSGTTK,;
CCDS34640.1, Del, T_7,
(SEQIDNO: 6936)
TRVQKREKNS,;
CCDS7214.1, Ins, T_7,
(SEQIDNO: 6938)
VYPWCWNEWK,;
CCDS7121.1, Ins, T_7,
(SEQIDNO: 6939)
YHLISCWSCW,;
CCDS1594.1, Ins, T_7,
(SEQIDNO: 6940)
YQERANKKQW,;
CCDS30587.1, Del, T_7,
(SEQIDNO: 6941)
AGRAMGRAP,;
CCDS31502.1, Ins, T_7,
(SEQIDNO: 6942)
ASLLGNTVG,;
CCDS55405.1, Ins, T_7,
(SEQIDNO: 6943)
CKTSHRQMC,;
CCDS43328.1, Ins, T_7,
(SEQIDNO: 6944)
CSFASESSC,;
CCDS41771.1, Del, T_7,
(SEQIDNO: 6945)
DQLMIFGLY,;
CCDS30963.1, Del, T_7,
(SEQIDNO: 6946)
DRVMMKKEL,;
CCDS1836.1, Del, T_7,
(SEQIDNO: 6947)
EMILFLMTF,;
CCDS55039.1, Ins, T_7,
(SEQIDNO: 6948)
ESSLLCYQR,;
CCDS56540.1, Ins, T_7,
(SEQIDNO: 6949)
FHPVFFHIY,;
CCDS9813.1, Ins, T_7,
(SEQIDNO: 6950)
FIHLLGGSV,;
CCDS31400.1, Ins, T_7,
(SEQIDNO: 6951)
FILDTSFWP,;
CCDS31281.1, Ins, T_7,
(SEQIDNO: 6952)
FKRSSKVPK,;
CCDS44927.1, Ins, T_7,
(SEQIDNO: 6953)
FLLFKREIE,;
CCDS643.1, Ins, T_7,
(SEQIDNO: 6954)
FLLSRSRGY,;
CCDS34355.1, Ins, T_7,
(SEQIDNO: 6956)
FSLFAYKHN,;
CCDS776.1, Del, T_7,
(SEQIDNO: 6957)
FSQKELREH,;
CCDS14238.1, Del, T_7,
(SEQIDNO: 6958)
FVCSFLFLS,;
CCDS46097.1, Del, T_7,
(SEQIDNO: 6959)
GAQALLNMR,;
CCDS47443.1, Ins, T_7,
(SEQIDNO: 6960)
GKTWRQNDR,;
CCDS11010.1, Del, T_7,
(SEQIDNO: 6962)
GSQQMRLGT,;
CCDS12936.1, Ins, T_7,
(SEQIDNO: 6963)
GVFSNWPFK,;
CCDS34226.1, Del, T_7,
(SEQIDNO: 6964)
HIFLSLKAT,;
CCDS2362.1, Del, T_7,
(SEQIDNO: 6965)
IAFSSQLFL,;
CCDS47510.1, Del, T_7,
(SEQIDNO: 6966)
ICLFYLCLF,;
CCDS31021.1, Del, T_7,
(SEQIDNO: 6967)
IPVIPAPIC,;
CCDS54212.1, Del, T_7,
(SEQIDNO: 6968)
IVNQTPHLQ,;
CCDS42411.1, Del, T_7,
(SEQIDNO: 6969)
KVMKLKISF,;
CCDS14489.1, Ins, T_7,
(SEQIDNO: 6971)
LFKRISSVC,;
CCDS42375.1, Ins, T_7,
(SEQIDNO: 6972)
LGAMGNNDM,;
CCDS14487.1, Ins, T_7,
(SEQIDNO: 6973)
LIQRVWSLC,;
CCDS45146.1, Ins, T_7,
(SEQIDNO: 6974)
LQLPLPGSL,;
CCDS41550.1, Del, T_7,
(SEQIDNO: 6976)
MSCFSTMST,;
CCDS907.1, Del, T_7,
(SEQIDNO: 6977)
NISLREQHV,;
CCDS1945.1, Del, T_7,
(SEQIDNO: 6978)
PAWEPVLNP,;
CCDS33549.1, Del, T_7,
(SEQIDNO: 6979)
PCGNLIEAP,;
CCDS34701.1, Del, T_7,
(SEQIDNO: 6980)
PCTRLGLGC,;
CCDS34867.1, Del, T_7,
(SEQIDNO: 6981)
PKSSPLFRM,;
CCDS6195.1, Ins, T_7,
(SEQIDNO: 6982)
PLTKRTVLS,;
CCDS45501.1, Del, T_7,
(SEQIDNO: 6983)
PSILIKSYI,;
CCDS583.1, Ins, T_7,
(SEQIDNO: 6984)
PTDWSIYGL,;
CCDS14073.1, Del, T_7,
(SEQIDNO: 6985)
QNSSGLIPH,;
CCDS7588.1, Del, T_7,
(SEQIDNO: 6986)
QVMVVGIVL,;
CCDS47584.1, Del, T_7,
(SEQIDNO: 6987)
QWISIRPRR,;
CCDS1536.1, Ins, T_7,
(SEQIDNO: 6988)
RKSIAMHCH,;
CCDS2211.1, Del, T_7,
(SEQIDNO: 6989)
RKSLATTVP,;
CCDS10094.1, Del, T_7,
(SEQIDNO: 6990)
RVRIITLRT,;
CCDS4455.1, Ins, T_7,
(SEQIDNO: 6991)
SGRAERTWL,;
CCDS34917.1, Ins, T_7,
(SEQIDNO: 6992)
SQLLCPKAA,;
CCDS2222.1, Ins, T_7,
(SEQIDNO: 6993)
SRAYGIFCN,;
CCDS5783.1, Ins, T_7,
(SEQIDNO: 6994)
SRIKFGRLS,;
CCDS14781.1, Ins, T_7,
(SEQIDNO: 6995)
SRWTNNIFH,;
CCDS31513.1, Del, T_7,
(SEQIDNO: 6996)
SWELPITQR,;
CCDS58423.1, Del, T_7,
(SEQIDNO: 6997)
TCLKMSIGA,;
CCDS53953.1, Del, T_7,
(SEQIDNO: 6998)
TIDLVTTCI,;
CCDS34789.1, Del, T_7,
(SEQIDNO: 7000)
TNKMKTQNV,;
CCDS9347.1, Del, T_7,
(SEQIDNO: 7001)
TPESLYWLS,;
CCDS41399.1, Del, T_7,
(SEQIDNO: 7002)
TPQVLPLTS,;
CCDS47834.1, Del, T_7,
(SEQIDNO: 7003)
TSFHLFHTA,;
CCDS41343.1, Del, T_7,
(SEQIDNO: 7005)
VKKSRSHFR,;
CCDS6778.1, Del, T_7,
(SEQIDNO: 7006)
WRDFPSTQG,;
CCDS44717.1, Ins, T_7,
(SEQIDNO: 7007)
WTSLQLLHI,;
CCDS103.1, Ins, T_7,
(SEQIDNO: 7008)
WTYGSCCSF,;
CCDS605.1, Ins, T_7,
(SEQIDNO: 7009)
YGNGICVWR,;
CCDS55121.1, Del, T_7,
(SEQIDNO: 7010)
YLPEIIRIQ,;
CCDS6047.1, Ins, T_7,
(SEQIDNO: 7011)
RKVLAGAS,;
CCDS4356.1, Del, T_7,
(SEQIDNO: 7012)
ARPGLMRG,;
CCDS30777.1, Ins, T_7,
(SEQIDNO: 7013)
CQADPKCH,;
CCDS1285.1, Ins, T_7,
(SEQIDNO: 7014)
CQLPFALR,;
CCDS45485.1, Ins, T_7,
(SEQIDNO: 7015)
CRHGRRTI,;
CCDS45060.1, Ins, T_7,
(SEQIDNO: 7016)
CVAPLLFC,;
CCDS31772.1, Ins, T_7,
(SEQIDNO: 7017)
FFSSSPVS,;
CCDS58947.1, Del, T_7,
(SEQIDNO: 7018)
FIIVSSHS,;
CCDS41769.1, Ins, T_7,
(SEQIDNO: 7019)
FLSSSPVS,;
CCDS12216.2, Ins, T_7,
(SEQIDNO: 7021)
FQGTNLPF,;
CCDS30902.1, Ins, T_7,
(SEQIDNO: 7022)
FRKTRDLK,;
CCDS47069.1, Ins, T_7,
(SEQIDNO: 7023)
FRLQNPQR,;
CCDS2154.1, Ins, T_7,
(SEQIDNO: 7024)
FSAWKEDL,;
CCDS9383.1, Ins, T_7,
(SEQIDNO: 7025)
FVFSCLLI,;
CCDS14231.1, Ins, T_7,
(SEQIDNO: 7026)
FWSSCKRP,;
CCDS7179.1, Ins, T_7,
(SEQIDNO: 7027)
GKSCSAFA,;
CCDS58060.1, Ins, T_7,
(SEQIDNO: 7029)
GNVGGQGL,;
CCDS14647.1, Ins, T_7,
(SEQIDNO: 7030)
HLGFCETS,;
CCDS33817.1, Del, T_7,
(SEQIDNO: 7031)
HMPGTYSS,;
CCDS861.1, Ins, T_7,
(SEQIDNO: 7032)
IASGLTGV,;
CCDS1916.1, Del, T_7,
(SEQIDNO: 7033)
IQLKVMKT,;
CCDS4379.2, Del, T_7,
(SEQIDNO: 7035)
LADLSLTK,;
CCDS12149.2, Del, T_7,
(SEQIDNO: 7036)
LCHRLRCL,;
CCDS31285.1, Ins, T_7,
(SEQIDNO: 7037)
LCNSVCSQ,;
CCDS30735.1, Ins, T_7,
(SEQIDNO: 7038)
LLFTWQVF,;
CCDS47907.1, Ins, T_7,
(SEQIDNO: 7039)
LPTRKFPL,;
CCDS3707.1, Del, T_7,
(SEQIDNO: 7040)
LVFGAHSF,;
CCDS4984.1, Del, T_7,
(SEQIDNO: 7041)
LVPLSFLP,;
CCDS34071.1, Del, T_7,
(SEQIDNO: 7043)
MAMFQQKT,;
CCDS43686.1, Del, T_7,
(SEQIDNO: 7044)
MFHYFLTF,;
CCDS45430.1, Del, T_7,
(SEQIDNO: 7045)
MMIITGRC,;
CCDS5685.1, Del, T_7,
(SEQIDNO: 7046)
MWSRDCLY,;
CCDS6947.1, Ins, T_7,
(SEQIDNO: 7047)
PFDGIEYF,;
CCDS58463.1, Del, T_7,
(SEQIDNO: 7048)
PWGLDLEY,;
CCDS13737.1, Del, T_7,
(SEQIDNO: 7049)
QSPSITTF,;
CCDS5777.1, Del, T_7,
(SEQIDNO: 7050)
RESLSAVE,;
CCDS3499.1, Del, T_7,
(SEQIDNO: 7051)
RLHFLHYL,;
CCDS42173.1, Del, T_7,
(SEQIDNO: 7052)
RQETSTPA,;
CCDS41963.1, Del, T_7,
(SEQIDNO: 7053)
RSLLLTCC,;
CCDS34917.1, Del, T_7,
(SEQIDNO: 7054)
RVHYGLYY,;
CCDS43235.1, Ins, T_7,
(SEQIDNO: 7055)
SCYLPSYL,;
CCDS34490.1, Ins, T_7,
(SEQIDNO: 7056)
SEIVSFRW,;
CCDS7407.1, Del, T_7,
(SEQIDNO: 7057)
SNRMKWKY,;
CCDS14238.1, Ins, T_7,
(SEQIDNO: 7058)
SPSALGHL,;
CCDS7647.1, Ins, T_7,
(SEQIDNO: 7060)
SRKSILEI,;
CCDS31997.1, Del, T_7,
(SEQIDNO: 7061)
SSLHLTKK,;
CCDS3569.1, Ins, T_7,
(SEQIDNO: 7062)
STKAQNPF,;
CCDS33268.1, Ins, T_7,
(SEQIDNO: 7063)
VSKRRCYP,;
CCDS55171.1, Ins, T_7,
(SEQIDNO: 7064)
YARDMQKL,;
CCDS3609.1, Del, T_7,
(SEQIDNO: 7065)
YWECSAAC,;
CCDS34627.1, Ins, T_8,
(SEQIDNO: 7067)
SQHECRSPTGHCLPESPSPEPRLPGCCGPCTVPGRSTAQRGQARGGPPGS
AVAHQGISDTRAPCSTAGPPGDFGC,;
CCDS3974.1, Del, T_8,
(SEQIDNO: 7068)
CRASLRTDCLLAVVIQFQISTYQAQLRISLRKQLLLFLVAKKTKQDILTH
IIECLKKMKTSTSLGMI,;
CCDS44248.1, Ins, T_8,
(SEQIDNO: 7070)
FRDPRDGIPGPQRPLPLRGIQGEVWQAQQEERVQRGAVGDREQPYCQGFR
LSVLPEKELCGRA,;
CCDS12270.1, Del, T_8,
(SEQIDNO: 7071)
GPVYYVCMKELTLERNRMNVSSVLKPFLFTVPIEDMRECTLGRNRMNVSS
VLKPCLIPVPI,;
CCDS53391.1, Ins, T_8,
(SEQIDNO: 7073)
CNLPSDIVGECTYCLHNMACSKPSSSHVLFPWPSLFPGAMVHQCHHSSAL
GSLSYPGW,;
CCDS35316.1, Del, T_8,
(SEQIDNO: 7074)
ILMMMTICHTVLPGGGIPPMTMRATRMAWQEEGEARVQVAIPSQSTLKTN
GKRGVTK,;
CCDS41653.1, Ins, T_8,
(SEQIDNO: 7075)
YHCRSLPNKSNKVSDSIWKTWEGSITYFTVLLRFGIFYCTYTLNIQLFQF
VSKTK,;
CCDS31747.1, Ins, T_8,
(SEQIDNO: 7076)
FLTSGQWDIFYVVEQQVHKVCHVSLKCLSLVPLIYSHSGKQQAATDSCEA
TVAS,;
CCDS31820.1, Ins, T_8,
(SEQIDNO: 7077)
FSCGNTDGHLDISYSLLHKHHPDNSENSFYESKEKSLFHLLLPYDSCLHL
LQ,;
CCDS46554.1, Del, T_8,
(SEQIDNO: 7078)
IFWNIKIRLLAWKESTIFQMLIIEKVLKIHKSMIQMKTHSRNITVQKNKN
T,;
CCDS31698.1, Del, T_8,
(SEQIDNO: 7079)
SVFVLFLNATCWQPWPAIATWPSAAHCSTGSSCPLGSVLCWWLLSSQ,;
CCDS31571.1, Ins, T_8,
(SEQIDNO: 7080)
YHCRSLPNKSNKVSDSIWNYKYFNHKHHLHNYYNYCSNSNNNRVVSF,;
CCDS8623.1, Ins, T_8,
(SEQIDNO: 7081)
FLLLHRCSHGNPFHYYGNNMECCIPKLIIQPRSSNSLDRKLLWPMS,;
CCDS30638.1, Del, T_8,
(SEQIDNO: 7082)
LLAHMYGFSTYGTQKGECVCLQCLSGSSLFILKQPLDLKISKTFM,;
CCDS53554.1, Del, T_8,
(SEQIDNO: 7083)
CRRLVSTLNFSAHLLMWTPCTVTWPICTLSSSKTHSTSMHMQQS,;
CCDS43042.1, Ins, T_8,
(SEQIDNO: 7085)
WHRSISGKALHTNYHAYNLHEPKCISGAGDAIHAESVHHHFPP,;
CCDS763.1, Ins, T_8,
(SEQIDNO: 7086)
FIPQTDNEIFTRKCCSVYSSPWHSFHYCTDHSLEFTYEVNWK,;
CCDS3271.1, Ins, T_8,
(SEQIDNO: 7087)
FLIVFETFPHDTKLVLEPLGPNSEHSHRAVLLLSSYRFDPI,;
CCDS44398.1, Del, T_8,
(SEQIDNO: 7088)
QPPKALQPPRAPQLPNAPQPPSIPQPPRAPQPLKLLQCL,;
CCDS12232.1, Del, T_8,
(SEQIDNO: 7089)
WRPPTRELGARWDAGLSGRKAPRVALSRPPGPQCPSGCA,;
CCDS14635.1, Del, T_8,
(SEQIDNO: 7090)
EQKSLSINVQNVSTRLPLECTHSVGYLESLLFTSNAIA,;
CCDS43437.1, Del, T_8,
(SEQIDNO: 7091)
CGCGHLSTLPSWPCKAFALASALGGAGASFFVLGTIL,;
CCDS47161.1, Del, T_8,
(SEQIDNO: 7092)
CLRMMMWEKELEVCALFWRRQRQKAIPTLNVIVMSLQ,;
CCDS7404.2, Ins, T_8,
(SEQIDNO: 7093)
CGVPDILHSGLRTNGMDPFHCRLCDHALCSTWECCQ,;
CCDS35401.1, Ins, T_8,
(SEQIDNO: 7094)
FRTIYFNYHHRWKQVNKYCWCSRRAPSSFEFPSAWK,;
CCDS9032.1, Ins, T_8,
(SEQIDNO: 7095)
SSWICCCRASIICSQHGVLYFGSPWMAENINKKCI,;
CCDS7761.1, Del, T_8,
(SEQIDNO: 7096)
CVGCQFIVPTRGAPLMARVHTEHSRVLLSPSFTC,;
CCDS3155.1, Ins, T_8,
(SEQIDNO: 7097)
LFSFPCWNYWKLFCNLGFYTEEYESQVCEHLLN,;
CCDS6244.1, Ins, T_8,
(SEQIDNO: 7098)
FWSFCVLQFNWSDERCDWSSYSQSELLPRLHG,;
CCDS32208.1, Del, T_8,
(SEQIDNO: 7099)
PLENTQIPRTSPLWKITMVLTYPNCVVHVLMF,;
CCDS45750.1, Del, T_8,
(SEQIDNO: 7100)
SSLLNFLRVQYIWRKLQMYFVFYKQSSLPCSL,;
CCDS1800.1, Ins, T_8,
(SEQIDNO: 7102)
FGRCNCCDKVCITGWEPIYAVHETDFKGKA,;
CCDS9879.1, Ins, T_8,
(SEQIDNO: 7103)
FPKDKKICTHGQPVHLDIGNHLQCCHVVGR,;
CCDS43187.1, Del, T_8,
(SEQIDNO: 7104)
GSNSNLGMKCGIQNQMLVIQQEAGFGILHT,;
CCDS43968.1, Del, T_8,
(SEQIDNO: 7105)
PWTLKKLLKTWLQMIIHLTYQRQLIDSSAT,;
CCDS3895.1, Del, T_8,
(SEQIDNO: 7106)
QSRIPSKKCSLRKSTKSYKSCTNLRNLAPT,;
CCDS47753.1, Del, T_8,
(SEQIDNO: 7107)
ESLPAFLRCHLKTEVPCGLWLRSMGEIAS,;
CCDS3123.1, Ins, T_8,
(SEQIDNO: 7108)
FEEKWCSSIPAKQSWRKHDVGNLSGCRIR,;
CCDS33705.1, Del, T_8,
(SEQIDNO: 7110)
LCFSCLDWIASLLKLKDRSHPWLIFTHPS,;
CCDS42040.1, Del, T_8,
(SEQIDNO: 7111)
SKTQRRYKLSSLKEDLLQRSAFTSQAPLY,;
CCDS46062.1, Ins, T_8,
(SEQIDNO: 7113)
LWESLYPEVTPHRTSENTHRRETLCLQ,;
CCDS8411.1, Del, T_8,
(SEQIDNO: 7114)
SPLWDCSTTTGTHHGCLWEIPSVTLLA,;
CCDS6460.1, Ins, T_8,
(SEQIDNO: 7116)
FPPARSLFTTEPIFQSSRGLMDGGSY,;
CCDS10239.1, Ins, T_8,
(SEQIDNO: 7117)
LYPPTRPTENKFPTRHKYPKKQTIGK,;
CCDS46640.1, Del, T_8,
(SEQIDNO: 7118)
SVVATPKTMSLMAVNHRALFFVAVNH,;
CCDS31112.1, Del, T_8,
(SEQIDNO: 7119)
YMWSFCFSPLWLMTAMWLSASHFTTL,;
CCDS6343.1, Del, T_8,
(SEQIDNO: 7120)
TKLMVWLQYGQAGKIRFTVLLFPPC,;
CCDS1331.1, Del, T_8,
(SEQIDNO: 7121)
CPAWIPTTRLTFVSKLWRYLFMRS,;
CCDS3895.1, Ins, T_8,
(SEQIDNO: 7122)
FSQESLQRNVHSGRVQNLTRAVPI,;
CCDS54989.1, Del, T_8,
(SEQIDNO: 7123)
SPVASRGWVKTLRAPTSTITGCPS,;
CCDS2621.1, Ins, T_8,
(SEQIDNO: 7124)
YWSHWQCFDRQHNPLHPQDGDSRV,;
CCDS43437.1, Ins, T_8,
(SEQIDNO: 7125)
FVAVDIFQHCLLGLAKPSLWLRL,;
CCDS1585.1, Del, T_8,
(SEQIDNO: 7126)
SLKRMRESPQSLPNSLTSLRSWR,;
CCDS33511.1, Del, T_8,
(SEQIDNO: 7127)
TLSCLGIFPDGHIYFDFYDLLFC,;
CCDS55323.1, Del, T_8,
(SEQIDNO: 7129)
MNSVNLSSPKARDWTVSELLKN,;
CCDS9086.1, Del, T_8,
(SEQIDNO: 7130)
SALLLGCLCFIALIGRLMFQAC,;
CCDS43661.1, Del, T_8,
(SEQIDNO: 7131)
VTEGNCSNYPAIILFSRSLSSS,;
CCDS3687.1, Ins, T_8,
(SEQIDNO: 7132)
WNGKHWITHGRGCGPIPDHLPS,;
CCDS9676.1, Del, T_8,
(SEQIDNO: 7133)
CGEVLDRLGVGFMWDERKSLL,;
CCDS10123.1, Del, T_8,
(SEQIDNO: 7135)
LELILETSAQKLLCWLCKKMD,;
CCDS34167.1, Del, T_8,
(SEQIDNO: 7136)
LHYLMRWPINLIRRWTSFWEI,;
CCDS9032.1, Del, T_8,
(SEQIDNO: 7137)
QLDLLLPSEYYMFPAWGSVFW,;
CCDS8684.1, Del, T_8,
(SEQIDNO: 7138)
SCRKIQINHKKKEKFHYHCMC,;
CCDS34057.1, Del, T_8,
(SEQIDNO: 7139)
TLNSLRWPLQLSNLAGSQISW,;
CCDS12934.1, Ins, T_8,
(SEQIDNO: 7140)
FGFWLVVVSEGAQKGRVLEI,;
CCDS41399.1, Ins, T_8,
(SEQIDNO: 7141)
FGIECGEDREDWNSTSVAAI,;
CCDS4065.1, Ins, T_8,
(SEQIDNO: 7142)
FLCQSNGSVDCNRKLSGIWT,;
CCDS31434.1, Del, T_8,
(SEQIDNO: 7143)
SRRNRRYRKIYGELKMSLQA,;
CCDS7404.2, Del, T_8,
(SEQIDNO: 7144)
WSSRHTSLRITHKRHGSIPL,;
CCDS45503.1, Ins, T_8,
(SEQIDNO: 7145)
YSNICANPSPLADLFTLALT,;
CCDS43042.1, Del, T_8,
(SEQIDNO: 7146)
APLNQRKSSTYKLPRLQSP,;
CCDS34627.1, Del, T_8,
(SEQIDNO: 7147)
ATRMPEPHRALPTRVPFP,;
CCDS3084.1, Ins, T_8,
(SEQIDNO: 7148)
FLPSSNAHRSKEGSCHSR,;
CCDS55673.1, Del, T_8,
(SEQIDNO: 7149)
TLILSTSQELCVIYVKEV,;
CCDS1308.1, Del, T_8,
(SEQIDNO: 7150)
EIFGATESTFLFLEIYM,;
CCDS12320.1, Ins, T_8,
(SEQIDNO: 7151)
FHCIWMPGQFAPDHDGL,;
CCDS31820.1, Ins, T_8,
(SEQIDNO: 7152)
FHLLGGDRILPSGCHVL,;
CCDS9491.1, Ins, T_8,
(SEQIDNO: 7153)
FLDSFVFIHDWVLLGHYS,;
CCDS31821.1, Ins, T_8,
(SEQIDNO: 7154)
FNSFGINRIFSSGCHVL,;
CCDS31747.1, Del, T_8,
(SEQIDNO: 7155)
PYKWPMGYFLCCGTTST,;
CCDS34002.1, Del, T_8,
(SEQIDNO: 7156)
SRNSTLLIEENLHEISKN,;
CCDS11901.1, Del, T_8,
(SEQIDNO: 7157)
AMTDDQRMVKNKQLLM,;
CCDS3687.1, Del, T_8,
(SEQIDNO: 7158)
EWQALDYSRSWLWTDT,;
CCDS12232.1, Ins, T_8,
(SEQIDNO: 7159)
FGGRLPGSWERAGTPD,;
CCDS5352.1, Ins, T_8,
(SEQIDNO: 7160)
FHPDLWNQSWHYNKSK,;
CCDS32008.1, Del, T_8,
(SEQIDNO: 7162)
SRSHLDFSPYWMKKVK,;
CCDS5933.1, Del, T_8,
(SEQIDNO: 7163)
WCTAVVAPTYFLHFTH,;
CCDS14570.1, Ins, T_8,
(SEQIDNO: 7164)
FHAFNFGSRFSVCFD,;
CCDS35057.1, Del, T_8,
(SEQIDNO: 7165)
MNSVNLSSPKASLLR,;
CCDS31424.1, Ins, T_8,
(SEQIDNO: 7166)
YWYFSRCRTSFFCSH,;
CCDS32086.1, Ins, T_8,
(SEQIDNO: 7167)
FATWSALVRLFPVE,;
CCDS10141.1, Ins, T_8,
(SEQIDNO: 7168)
FEFCDIQLSMGSSR,;
CCDS31434.1, Ins, T_8,
(SEQIDNO: 7169)
FPGEIADTERSMEN,;
CCDS43612.1, Ins, T_8,
(SEQIDNO: 7170)
FPLFLCQRCDSSIC,;
CCDS3892.1, Ins, T_8,
(SEQIDNO: 7171)
FQFSCCQSKLHSTG,;
CCDS31112.1, Ins, T_8,
(SEQIDNO: 7172)
CICGASVSHHYGS,;
CCDS1515.1, Ins, T_8,
(SEQIDNO: 7173)
FQFAEWENFNTSR,;
CCDS5729.1, Del, T_8,
(SEQIDNO: 7174)
SQEILVIALLLKR,;
CCDS45014.1, Del, T_8,
(SEQIDNO: 7175)
TLSCLGIFPDGHI,;
CCDS1308.1, Ins, T_8,
(SEQIDNO: 7176)
WKFSGQQNPLFYF,;
CCDS7106.1, Ins, T_8,
(SEQIDNO: 7177)
YALLKASWKRKQS,;
CCDS45085.1, Del, T_8,
(SEQIDNO: 7179)
YSASGHGVRITKS,;
CCDS32086.1, Del, T_8,
(SEQIDNO: 7180)
CHLVSTCQTIPS,;
CCDS9231.1, Ins, T_8,
(SEQIDNO: 7181)
CQTQARVDGYNR,;
CCDS32008.1, Ins, T_8,
(SEQIDNO: 7182)
FPEAIWISHLIG,;
CCDS8632.1, Ins, T_8,
(SEQIDNO: 7183)
FPILYFFYFDDL,;
CCDS31561.1, Del, T_8,
(SEQIDNO: 7184)
SLSAWVCLSASS,;
CCDS14624.1, Ins, T_8,
(SEQIDNO: 7185)
YYIRAAKEASNL,;
CCDS3974.1, Ins, T_8,
(SEQIDNO: 7186)
FAGLHSGQTVF,;
CCDS34097.1, Ins, T_8,
(SEQIDNO: 7187)
FIQVRSCRKRS,;
CCDS5729.1, Ins, T_8,
(SEQIDNO: 7188)
FRRRYWLLPCF,;
CCDS46580.1, Ins, T_8,
(SEQIDNO: 7189)
FVGTRTSTSEK,;
CCDS1792.1, Del, T_8,
(SEQIDNO: 7190)
ILKQVARMCLI,;
CCDS34146.2, Ins, T_8,
(SEQIDNO: 7191)
LHSSIYKMSFS,;
CCDS12320.1, Del, T_8,
(SEQIDNO: 7192)
SLHLDAWTICS,;
CCDS4697.1, Del, T_8,
(SEQIDNO: 7193)
VVCLSRRMKRC,;
CCDS47753.1, Ins, T_8,
(SEQIDNO: 7194)
WNHCLPFSGVI,;
CCDS31551.1, Del, T_8,
(SEQIDNO: 7195)
WWDSMTSFLSW,;
CCDS1331.1, Ins, T_8,
(SEQIDNO: 7196)
FALPGYLPQG,;
CCDS861.1, Ins, T_8,
(SEQIDNO: 7197)
FHDVCGRENI,;
CCDS53693.1, Ins, T_8,
(SEQIDNO: 7198)
FNFLKEEQSL,;
CCDS4446.1, Ins, T_8,
(SEQIDNO: 7199)
FTAQPCESTH,;
CCDS11295.1, Del, T_8,
(SEQIDNO: 7200)
IEQNLIGKKN,;
CCDS14520.1, Ins, T_8,
(SEQIDNO: 7201)
LAPCNFYLFT,;
CCDS46472.1, Del, T_8,
(SEQIDNO: 7202)
NHQKGKFMNF,;
CCDS58915.1, Del, T_8,
(SEQIDNO: 7203)
QQFTLRSFSI,;
CCDS33817.1, Del, T_8,
(SEQIDNO: 7204)
SVLRTSLKSF,;
CCDS4447.1, Del, T_8,
(SEQIDNO: 7205)
TTLSFVLIEE,;
CCDS47894.1, Del, T_8,
(SEQIDNO: 7206)
CRNMKQQIY,;
CCDS47622.1, Ins, T_8,
(SEQIDNO: 7207)
FALCSRKNL,;
CCDS54989.1, Ins, T_8,
(SEQIDNO: 7208)
FLRSHPGAG,;
CCDS42040.1, Ins, T_8,
(SEQIDNO: 7209)
FPRLKEDTS,;
CCDS41355.1, Ins, T_8,
(SEQIDNO: 7210)
FQKCIYINS,;
CCDS6201.1, Del, T_8,
(SEQIDNO: 7211)
RMRKWRDQI,;
CCDS33705.1, Ins, T_8,
(SEQIDNO: 7212)
YYASLAWTG,;
CCDS53554.1, Ins, T_8,
(SEQIDNO: 7213)
FAEGLSQL,;
CCDS31561.1, Ins, T_8,
(SEQIDNO: 7214)
FLCRHGSV,;
CCDS3883.1, Ins, T_8,
(SEQIDNO: 7215)
FRRVREVP,;
CCDS43328.1, Ins, T_8,
(SEQIDNO: 7216)
FSHQHGRN,;
CCDS45085.1, Ins, T_8,
(SEQIDNO: 7217)
FTVPVGTA,;
CCDS46286.1, Del, T_8,
(SEQIDNO: 7219)
KLQEANGI,;
CCDS12270.1, Ins, T_8,
(SEQIDNO: 7220)
LAQFITYA,;
CCDS6244.1, Del, T_8,
(SEQIDNO: 7221)
LEFLCSPV,;
CCDS2621.1, Del, T_8,
(SEQIDNO: 7223)
LVSLAMFR,;
CCDS12934.1, Del, T_8,
(SEQIDNO: 7224)
RILACCGI,;
CCDS43612.1, Del, T_8,
(SEQIDNO: 7225)
SFIPLSEM,;
CCDS4065.1, Del, T_8,
(SEQIDNO: 7226)
SLSKQWQC,;
CCDS8632.1, Del, T_8,
(SEQIDNO: 7227)
SYTIFLLF,;
CCDS6896.2, Del, T_8,
(SEQIDNO: 7228)
TGLTRMMR,;
CCDS4697.1, Ins, T_8,
(SEQIDNO: 7229)
WWSVYQEG,;
CCDS35114.1, Del, T_9,;
(SEQIDNO: 7230)
FRSPSWSLPFPGSSCLSPSPGLCLGVQSSGQDSRERVWLQPAPLLPAAQD
AGWGTGARVVPPTDQSAAPRWGALQRCSEACTSLATGTCRGDTR,;
CCDS43176.1, Ins, T_9,;
(SEQIDNO: 7231)
FVYVCDAVAGCAAGPHQHRPHHHHGADDRSYARADSPSLCGSRHLLCCPV
NGAVPVYGQTGI,;
CCDS55691.1, Ins, T_9,;
(SEQIDNO: 7232)
FCRSPSRHCYGIQDIKNHLVLSNSQWQTARINRWLISCCCIPIHCGGIQF
FPKILQ,;
CCDS44954.1, Del, T_9,
(SEQIDNO: 7233)
LSAIRKMTYFTSWILDSDSTHYIPSCNRKSCYKRMWS,;
CCDS54758.1, Del, T_9,
(SEQIDNO: 7234)
LPILMMPSKKLILYLFLCCPTLSFWQREQPSRT,;
CCDS8942.1, Del, T_9,
(SEQIDNO: 7235)
CYLAGSKMTSLTSGWNGKRQSCSQLCLLPCTI,;
CCDS43176.1, Del, T_9,
(SEQIDNO: 7236)
CLRVRCGGWLCGWTSSASPSSPPRG,;
CCDS2223.2, Ins, T_9,
(SEQIDNO: 7237)
FADAEESIGSLCDICSCQECPCCP,;
CCDS8638.1, Ins, T_9,;
(SEQIDNO: 7238)
FNSNNGFICSRKLCQWLHSTGKFH,;
CCDS5044.1, Ins, T_9,;
(SEQIDNO: 7239)
FPSTLDFGVLYFNFMLYLGDVSTE,;
CCDS9457.1, Del, T_9,;
(SEQIDNO: 7240)
YMKKNLTPSFAMKYLPPICTLGDQ,;
CCDS44615.1, Ins, T_9,;
(SEQIDNO: 7241)
FYHLWLSINRHREKVNQAFGA,;
CCDS30978.1, Del, T_9,;
(SEQIDNO: 7242)
SIPHVPKVTAAHSVTVKLQ,;
CCDS10926.1, Ins, T_9,
(SEQIDNO: 7243)
FCNVRQSERWNSLLPKQK,;
CCDS449.1, Ins, T_9,;
(SEQIDNO: 7244)
FICCINWSKGAFCCIWFL,;
CCDS33545.1, Ins, T_9,
(SEQIDNO: 7245)
FSIWVTSTCFSTDMGTS,;
CCDS3455.1, Del, T_9,
(SEQIDNO: 7246)
LPILMMPSKKLILYLFL,;
CCDS5605.1, Ins, T_9,;
(SEQIDNO: 7247)
FNPNWSFQCWPGCPMY,;
CCDS35114.1, Ins, T_9,;
(SEQIDNO: 7248)
FSAPPPGPSHFLAPPV,;
CCDS55624.1, Ins, T_9,
(SEQIDNO: 7249)
FCTIGRKMEKQSDL,;
CCDS55691.1, Del, T_9,
(SEQIDNO: 7250)
LPLTFSTLLWDSRH,;
CCDS44615.1, Del, T_9,
(SEQIDNO: 7251)
LSSLALYQSPQRKG,;
CCDS3500.1, Ins, T_9,
(SEQIDNO: 7252)
FSNHDRWKHNICV,;
CCDS55621.1, Ins, T_9,
(SEQIDNO: 7254)
FVPLAERWKNSL,;
CCDS2223.2, Del, T_9,
(SEQIDNO: 7255)
CRCRREYRVTM,;
CCDS55621.1, Del, T_9,;
(SEQIDNO: 7256)
CTIGRKMEKQS,;
CCDS58143.1, Ins, T_9,
(SEQIDNO: 7257)
FNLVFSPILSL,;
CCDS55624.1, Del, T_9,;
(SEQIDNO: 7258)
LYHWPKDGKTV,;
CCDS55780.1, Ins, T_9,
(SEQIDNO: 7259)
FCWILSCKT,;
CCDS33545.1, Del, T_9,;
(SEQIDNO: 7260)
FNLGYLNLF,;
CCDS30978.1, Ins, T_9,;
(SEQIDNO: 7261)
FLFHMYQR,;
CCDS47916.1, Del, T_9,
(SEQIDNO: 7262)
FTIGITWI,;
CCDS8942.1, Ins, T_9,;
(SEQIDNO: 7263)
FVIWLGAR,;
CCDS700.1, Del, T_9,;
(SEQIDNO: 7264)
LILWSSRQ,;.

### EXAMPLES

[0101] The following examples are given for the purpose of illustrating various embodiments of the invention and are not meant to limit the present invention in any fashion. The present examples, along with the methods described herein are presently representative of preferred embodiments, are exemplary, and are not intended as limitations on the scope of the invention. Changes therein and other uses which are encompassed within the spirit of the invention as defined by the scope of the claims will occur to those skilled in the art.

### Example 1: Screening Human Cancer Patients for Vaccine Candidates

[0102] The peptide sequence of the FSP array was from our human or dog FS database. It includes the most of the MS FS antigens (homopolymer size >6nt, peptide size >9 a.a) and potential FSP caused by mis-splicing of each exon. All FS antigens were segmented into 10 to 15 a.a long peptides. The array was synthesized by Nimblegen with photolithography. There were about 400K peptides of each FSP array, including ˜14K MS FSPs. Total 99 cancer serum from 6 different cancer and 64 non-cancer normal controls were analyzed with the 400K array (FIG. 8A). Cancer patients had much higher IgG reactive to the FSPs. However, there is still a small portion FSPs don't have IgG positive reactive in cancers (FIG. 8A). It was determined that positive IgG reactive FSPs have better protection (FIG. 9, FIG. 10, FIG. 11). Based on the IgG reactivity to FSPs, 20 best reactive FS antigens can be selected for each cancer patient as personalized cancer vaccine, including GBM and pancreatic cancer patients, which have low or no DNA neo-antigens for their personalized cancer vaccine (FIG. 8B and FIG. 8C).

### Example 2: Screening Dog Cancer Patients for Vaccine Candidates

[0103] Blood from dogs with various cancers was used to screen vaccine candidate peptides. 830 spotted peptides corresponding to 374 different FS antigens from 209 genes in dogs. Sera from dogs with 8 different cancers, (N=116), including mammary cancer, were compared to sera from dogs without cancer (N=52). Results of the screen are shown in FIG. 9. Red spots indicate the normalized florescent value of the peptide was 5 fold higher than in the corresponding sample. There were a total 487 FS peptides had at least one example of 5 fold higher reactivity. The dogs with cancer also showed higher antibody reactive to the FS peptide. Each type of cancer has its own reactive profile, as well as each individual dogs.

[0104] Data from individual dogs is shown in FIG. 13A and FIG. 13B. Screening of 6 dogs with cancer for specific cancer vaccine candidates. In FIG. 13A, a corner of the scanned FS array of each cancer dog analysis is shown. In FIG. 13B. data is shown of normalized antibody active to each peptide of each cancer dog. These data showed that each dog has personal highly reactive FS peptides.

[0105] T-cell reactivity was determined for candidate vaccine peptides. For a specific dog screened using the arrays in FIG. 13A and FIG. 13B, 5 FS antigens that were highly antibody reactive were tested in ELI-Spot assays. PBMCs from the dogs' blood were purified, stimulated with pooled peptides from each FS antigen candidates and the number of positive cells counted. The number for positive for each FS antigen stimulant is shown. As can be seen all 5 FS antigens showed significant T-cell reactivity compare to the medium control (FIG. 14).

### Example 3: Cancer Vaccine for Dogs

[0106] 1001061A safety trial of FS peptide based cancer vaccine was conducted in dogs. The cancer vaccine was formulated with 21 FS antigens. Three healthy dogs were immunized with the vaccine according to the timeline shown in FIG. 15A. An ELISA analysis was conducted on the antibody reactivity of the immunization, shown in FIG. 15B. ELISPOT analysis was conducted to measure the specific IFNγ releasing PBMCs to the vaccine antigens after immunization, shown in FIG. 15C. Standard clinicopathologic analysis showed the vaccine is safe for these three dog.

### Example 4: Frameshift Peptide Vaccines Protect Against Cancer

[0107] To determine whether any MS Indel event could produce a FS in any constitutive gene and could therefore be a protective antigen against most or all tumor types, three predicted MS FSs in mouse genes were selected using the criteria of FS peptide length and predicted H2-D epitopes (Table 3). Each FS peptide was tested individually in the 4T1-BALB/c mouse breast tumor model with the prophylactic vaccination of gene vaccine/peptide boost. Each FS peptide vaccination significantly slowed the tumor growth compared to the mock immunized mice (FIG. 16A). Each FS antigen can elicit specific IFNγ releasing splenocytes (FIG. 16B). These results indicate that any FSs produced by MS can confer protection. Peptides tested are listed in Table 1.

TABLE 3
The three MS FSPs with predicted H2-D epitopes
for the vaccine test. Table 3 discloses SEQ
ID NOS 7265-7267, respectively, in order of
appearance.

| Gene | MS | FS | FS | FS peptide |
|---|---|---|---|---|
| ID | type | type | size | (Kd/Ld score >20) |
| MS0518 | 10A | Del | 59 aa | TLCMEVMLRWNTRELGYLYLOLC |
| | | | | FLNTHFEMTSQEEKLLTIGRFKT |
| | | | | WTSPCGSPVIRPL |
| MS7927 | 9A | Del | 33 aa | ICMSPPL [symbol] QAPETISAACKAS |
| | | | | VRPEG [symbol] |
| MS2255 | 9A | Ins | 25 aa | YFSCDKRCIKHYA [symbol] NKSLLYE |
| | | | | SGY |

[symbol]

indicates data missing or illegible when filed

[0108] In another demonstration, two different pools of mouse FS antigen of the different MS length were selected (Table 4) and tested in the same mouse tumor model. Both FS pooled vaccine significantly retarded tumor growth comparing to the control group (FIG. 17A and FIG. 17B).

TABLE 4
Two pools of the FS antigens from the different MS length.

| | | | | |
|---|---|---|---|---|
| | | | | peptide size |
| Ag ID | Ref Gene | MS type | INDEL | (aa) |

Short MS pool

| | | | | |
|---|---|---|---|---|
| Mus385 | NM_146792.2 | 8T | Deletion | 32 |
| Mus392 | NM_029998.3 | 8T | Deletion | 51 |
| Mus023 | NM_147003.1 | 8T | Insertion | 19 |
| Mus263 | NM_001114663.1 | 8A | Insertion | 20 |
| Mus942 | NM_001081355.3 | 8A | Insertion | 37 |
| Mus671 | NM_001163189.1 | 8A | Insertion | 49 |
| Mus334 | NM_130448.3 | 8A | Deletion | 29 |
| Mus051 | NM_033618.3 | 8A | Insertion | 26 |
| Mus587 | NM_001081302.1 | 8A | Insertion | 32 |
| MS255 | NM_010086.4 | 9A | Insertion | 24 |
| MS927 | NM_053009.3 | 9A | Deletion | 33 |
| MS518 | NM_153511.3 | 10A | Deletion | 59 |

Long MS pool

| | | | | |
|---|---|---|---|---|
| Mus487 | NM_001109759.1 | 10A | Deletion | 44 |
| Mus413 | NM_027009.2 | 10A | Deletion | 27 |
| Mus274 | NM_001081345.2 | 10A | Insertion | 14 |
| Mus694 | NM_028787.4 | 10T | Insertion | 45 |
| Mus281 | NM_001160399.1 | 11A | Deletion | 39 |
| Mus951 | NM_025441.3 | 11A | Deletion | 36 |
| Mus461 | NM_001033226.4 | 13T | Deletion | 22 |
| Mus528 | NM_001034881.3 | 14T | Deletion | 54 |
| Mus414 | NM_028664.1 | 18T | Deletion | 28 |

[0109] The FS vaccine was also tested in a mouse ovarian cancer model (ID8-057BL6). A pool of FSP from 10 MS FS and 3 mis-splicing FS was used to immunize, as well as a pool of peptides from the point DNA mutation if the ID8 cells were immunized the mice after the tumor cell injection. Both vaccines showed the significant protection comparing to the control mice which were immunized with PBS (FIG. 18). The same sets of the vaccines combined with immune checkpoint treatment also showed the significant protection. This experiment shows our FS variants have the same protection as the neo-antigens from the DNA mutations.

### Example 5: Personalized Vaccine Test in Mouse Tumor Models

[0110] Protection by a personalized pool of FS neoantigens was tested in the 4T1 BALB/c tumor model (FIG. 19). Serum from BALB/c mice (n=10/group) were collected two days previous and 7-days post subcutaneous injection of 4T1 tumor cells (500 cells/mouse). Both sera were run on microarray slides containing peptides for human FS neoantigens and the 10 mouse homologs neoantigens with higher median normalized signal on the array were selected as targets for the vaccines formulations for each mice. Mice were vaccinated subcutaneously on days 12 and 19. For the immunization group with the combined immunotherapy, the antibody treatment, anti-PD-L1 and CTLA-4, were administrated intraperitoneally on days 12, 15, 19, 22. Control group (non-treated) was immunized with PBS at the same schedule as the vaccine groups. Non-reactive groups were immunized with FS antigens without signal in the microarray before and after tumor challenge, and followed the same vaccine regimen as the other groups. The test shows that the personalized positive FSPs selected from the FSP array have significant protection as a vaccine. It also shows again that the negative IgG reactive FSPs don't have the protection.

[0111] The personalized cancer vaccine was also tested in a spontaneous mouse breast tumor model (FIG. 20). Female FVB/N mice (n=22) were evaluated weekly for the presence of palpable tumor, when tumor was detected sample blood was collected and run on microarray slides containing peptides for human FS neoantigens. The 10 mouse homologs neoantigens with higher median normalized signal compared to age matched FVB/NJ samples on the array were selected as targets for the vaccines formulations for each mice. Mice were vaccinated subcutaneously with pool of Fs peptide with minimum two doses and maximum seven doses, as needed to maintain tumor control, with intervals 1-2 weeks between doses. Each vaccine dose was followed by checkpoint inhibitor treatment (antibody anti-PD-L1 and anti-CTLA-4) (CPI), two doses, three days a part. As a control, animals were immunized with PBS (non-treated) at the same schedule as the vaccine groups or only with CPI treatment (CPI only), twice per animal. Personalized Fs vaccine conferred 68.2% of protection. Both personalized cancer vaccine tests with our SPCV system showed significant protection in two different mouse tumor models. It suggests the SPCV system may also work with human cancer treatment.

### Example 4: Personalized Cancer Vaccine

[0112] An individual presenting with histologically confirmed stage 1 breast cancer is in need of treatment. A blood sample is obtained from the individual and serum from the blood sample is applied to a peptide array having approximately 20,000 spotted FS peptides. After incubation, the array is washed and the patient's bound antibodies are detected using a fluorescently labeled secondary antibody. FS peptides are found to bind specifically to the patient's sera and not to sera from healthy individuals. These reactive FS peptides are prepared in a vaccine preparation including a poly I:C adjuvant and administered to the individual with a checkpoint inhibitor or combination of checkpoint inhibitors after receiving a lumpectomy surgery. The individual is monitored for breast cancer recurrence and is cancer-free for five years.

### Example 5: Clinical Trial for a Personalized Cancer Vaccine

[0113] Ten individuals presenting with histologically confirmed stage 1 breast cancer are in need of treatment. Blood samples are obtained from each individual and serum from the blood samples were applied to peptide arrays having approximately 20,000 spotted FS peptides. After incubation, the arrays are washed and the patients' bound antibodies are detected using a fluorescently labeled secondary antibody. FS peptides are found to specifically bind to the patients' sera but not to sera from healthy individuals. Reactive FS peptides are prepared in a vaccine preparation for each patient including a poly I:C adjuvant. The FS vaccine components are chosen from pre-synthesized reagents. Each individual is given their vaccine after receiving lumpectomy surgery. Vaccinated individuals are monitored for breast cancer recurrence and nine of the ten individuals remain cancer free for five years. Ten individuals receive a lumpectomy surgery only and six of the ten individuals remain cancer free for five years. This Example demonstrates that a personalized cancer vaccine provides increased efficacy in breast cancer treatment compared to lumpectomy surgery only.

[0114] While preferred embodiments have been shown and described herein, it will be obvious to those skilled in the art that such embodiments are provided by way of example only. Numerous variations, changes, and substitutions will now occur to those skilled in the art. It should be understood that various alternatives to the embodiments described herein may be employed in practicing the invention. It is intended that the following claims define the scope of the invention and that methods and structures within the scope of these claims and their equivalents be covered thereby.

1. A method of treating an individual in need of treatment for a cancer, the method comprising:
a) identifying peptides that are immunoreactive with a biological sample from the individual in a first population of peptides;
b) preparing a vaccine composition comprising a second population of peptides comprising one or more peptides identified in step a) or a nucleic acid sequence encoding the second population of peptides; and
c) administering an effective amount of the vaccine composition to the individual, thereby treating the cancer.

2. The method of claim 1, comprising obtaining the biological sample from the individual.

3. The method of claim 1, wherein treating the cancer comprises reducing tumor size, inhibiting tumor growth, reducing tumor burden, increasing survival, or increasing cancer-free survival.

4. The method of claim 1, wherein administering the vaccine composition elicits an immune response in the individual against the cancer.

5. The method of claim 1, wherein the second population of peptides is a subpopulation of the first population.

6. The method of claim 1, wherein the identified peptide elicits a positive response in an antibody assay or a T cell assay performed on the biological sample from the individual.

7. The method of claim 1, wherein the biological sample is selected from the group consisting of blood, plasma, serum, thymus, bone marrow, spleen, lymph node, bronchoalveolar lavage, breast, central nervous system, cerebrospinal fluid, eye, tears, gastrointestinal tract, saliva, feces, urine, heart, kidney, liver, lung, muscle, pancreas, peripheral nervous system, saliva, skin, thyroid, trachea, and tumor.

8. The method of claim 1, wherein the biological sample comprises cells selected from B cells, T cells, CD4+ T cells, CD8+ T cells, Th17 cells, and combinations thereof.

9. The method of claim 1, wherein the biological sample comprises an antibody.

10. The method of claim 1, wherein identifying comprises determining immunoreactivity of the first population of peptides to the biological sample using antibody reactivity using an antibody assay selected from the group consisting of ELISA, radio-immuno assay, western blot, surface plasmon resonance, immunostaining, immunoprecipitation, mass spectrometry, phage display, ELISPOT, flow cytometry, cytometric bead array, immunohistochemistry, high density array, microarray, delayed-type hypersensitivity (DTH), and combinations thereof.

11. (canceled)

12. The method of claim 1, wherein identifying comprises determining immunoreactivity of the first population of peptides to the biological sample using a T cell response using an assay selected from the group consisting of proliferation assay, 3H-thymidine assay, BrdU assay, CFSE assay, cytokine secretion assay, ELISA assay, ELISPOT assay, intracellular staining assay, quantitative rtPCR assay, cytometric bead array assay, cytotoxicity assay, 51-chromium assay, degranulation assay, granulysin assay, granzyme A assay, granzyme B assay, and perforin assay.

13. (canceled)

14. The method of claim 1, wherein the first population of peptides comprises peptides encoded by a frameshifted mRNA expressed by a cancer cell.

15. (canceled)

16. The method of claim 1, wherein the first population of peptides comprises peptides having a sequence selected from SEQ ID NO: 1-7264.

17.-19. (canceled)

20. The method of claim 1, wherein the first population of peptides is bound to a substrate.

21. (canceled)

22. The method of claim 1, wherein the vaccine composition comprises a pharmaceutically acceptable adjuvant or excipient.

23. The method of claim 22, wherein the adjuvant is selected from the group consisting of ABM2, AS01B, AS02, AS02A, Adjumer, Adjuvax, Algammulin, Alum, Aluminum phosphate, Aluminum potassium sulfate, Bordetella pertussis, Calcitriol, Chitosan, Cholera toxin, CpG, Dibutyl phthalate, Dimethyldioctadecylammonium bromide (DDA), Freund's adjuvant, Freund's complete, Freund's incomplete (IFA), GM-CSF, GMDP, Gamma Inulin, Glycerol, HBSS (Hank's Balanced Salt Solution), IL-12, IL-2, Imiquimod, Interferon-Gamma, ISCOM, Lipid Core Peptide (LCP), Lipofectin, Lipopolysaccharide (LPS), Liposomes, MF59, MLP+TDM, Monophosphoryl lipid A, Montanide IMS-1313, Montanide ISA 206, Montanide ISA 720, Montanide ISA-51, Montanide ISA-50, nor-MDP, Oil-in-water emulsion, P1005 (non-ionic copolymer), Pam3Cys (lipoprotein), Pertussis toxin, Poloxamer, QS21, RaLPS, Ribi, Saponin, Seppic ISA 720, Soybean Oil, Squalene, Syntex Adjuvant Formulation (SAF), Synthetic polynucleotides (poly IC/poly AU), TiterMax Tomatine, Vaxfectin, XtendIII, and Zymosan.

24.-26. (canceled)

27. The method of claim 1, wherein the vaccine is administered via a route selected from the group consisting of subcutaneous, intradermal, intramuscular, intranasal, intravenous, and sublingual.

28. (canceled)

29. The method of claim 1, wherein the individual is a human, a cat, a mouse, a rat, a rabbit, a horse, a cow, or a pig.

30. The method of claim 1, wherein the cancer is selected from the group consisting of Acute lymphoblastic leukemia, Acute monocytic leukemia, Acute myeloid leukemia, Acute promyelocytic leukemia, Adenocarcinoma, Adult T-cell leukemia, Astrocytoma, Bladder cancer, Bone Cancer, Brain Tumor, Breast Cancer, Burkitt's lymphoma, Carcinoma, Cervical Cancer, Chronic Lymphocytic Leukemia, Chronic myelogenous leukemia, Colon Cancer, Colorectal cancer, Endometrial cancer, Glioblastoma multiforme, Glioma, Hepatocellular carcinoma, Hodgkin's lymphoma, Inflammatory breast cancer, Kidney Cancer, Leukemia, Lung cancer, Lymphoma, Malignant Mesothelioma, Medulloblastoma, Melanoma, Multiple myeloma, Neuroblastoma, Non-Hodgkin Lymphoma, Non-Small Cell Lung Cancer, Ovarian Cancer, Pancreatic Cancer, Pituitary tumor, Prostate cancer, Retinoblastoma, Skin Cancer, Small Cell Lung Cancer, Squamous cell carcinoma, Stomach cancer, T-cell leukemia, T-cell lymphoma, Thyroid cancer, and Wilms' tumor.

31.-124. (canceled)

125. A method of determining whether an individual has a cancer, the method comprising:
a) obtaining a biological sample derived from the individual;
b) determining immunoreactivity of the biological sample derived from the individual to the second population of peptides of claim 1; and
c) determining that the individual has cancer when the sample derived from the individual is immunoreactive with one or more of the second population of peptides.

The application's sequence listing, which the Patent Office published only in electronic form, follows.

SEQUENCE LISTING (7274 sequences)

SEQ ID NO: 1 - protein, 100 aa, Homo sapiens
RKRMKTGAIQEKGAIQEKGAMTKRICVVNFEACREMESLSAPEKITLFEAHMARCTSINVLCVRASLIEKLMKEKRKMKRNQVASPQIMQRMSAVNFETI

SEQ ID NO: 2-3 - skipped (2 entries)

SEQ ID NO: 4 - protein, 59 aa, Homo sapiens
SEIPEKAGGRRMWMMMEKRKSSWSVLRSSQCQPVMRRMKYPPQNPAEGRKPRVVMFLQP

SEQ ID NO: 5 - skipped

SEQ ID NO: 6 - protein, 47 aa, Homo sapiens
RKRKREKRSQKSRQNHLQLKSCRRKISNWSLKKVPALKKLRSPLWIF

SEQ ID NO: 7 - protein, 41 aa, Homo sapiens
KSTRREMPSQATPSPPGPWRAALGKEVKRSQSKLRLRNTSP

SEQ ID NO: 8 - protein, 38 aa, Homo sapiens
KTSDFPMCWLRQSDSRSVYSEGFSGFGMACGMFEMCGV

SEQ ID NO: 9 - protein, 36 aa, Homo sapiens
KKFIYIHCVDRGLLFPETWGFEQNNTWRQYNETSFL

SEQ ID NO: 10 - protein, 34 aa, Homo sapiens
SLVRLSSCVPVALMSAMTTSSSQKNITPAILTCC

SEQ ID NO: 11 - protein, 32 aa, Homo sapiens
KNKKILGQEKTEVARNGNERSSASRRTEEINR

SEQ ID NO: 12 - protein, 32 aa, Homo sapiens
KVWRRKTESKPIPRLPARVSWCNEHRVDNRKL

SEQ ID NO: 13 - protein, 32 aa, Homo sapiens
RKKKRRTKREREEKSQKRRTCRPTRCSVKSIA

SEQ ID NO: 14 - protein, 31 aa, Homo sapiens
KTSGFHDLQLRPCNTLTPFLLLQDFWKQILM

SEQ ID NO: 15 - protein, 28 aa, Homo sapiens
KEKRREGQRERERRKAKKEEHVGLPGVL

SEQ ID NO: 16 - protein, 27 aa, Homo sapiens
KAGREQSQTAGRTIQCFPDRNQAAPFC

SEQ ID NO: 17 - protein, 27 aa, Homo sapiens
NLHLCYYHSQSNRNKSRQMESLGMKLQ

SEQ ID NO: 18 - protein, 26 aa, Homo sapiens
KGQSGCLNIWNRIEPASTYRQYSGTK

SEQ ID NO: 19 - protein, 26 aa, Homo sapiens
KHYNRKISIKKLNRMKVPLMKLITRV

SEQ ID NO: 20 - protein, 26 aa, Homo sapiens
KQLRCWNTWAKMFFMVFLIIWQNTMF

SEQ ID NO: 21 - protein, 25 aa, Homo sapiens
ITHPFASQPLGQEMPNNTQIRLLKP

SEQ ID NO: 22 - protein, 25 aa, Homo sapiens
KLKLAPLQVTTTLKLILVMLEIVTE

SEQ ID NO: 23 - protein, 24 aa, Homo sapiens
KTYTCAITTVKATETKAGKWSRWE

SEQ ID NO: 24 - protein, 23 aa, Homo sapiens
KNPPGGRCPPRPLQALQVHGEQP

SEQ ID NO: 25 - protein, 21 aa, Homo sapiens
KGVRILKLCSKVSFRVDWITS

SEQ ID NO: 26 - protein, 20 aa, Homo sapiens
KLLIHLPPSHWDRKCQTTPR

SEQ ID NO: 27 - protein, 20 aa, Homo sapiens
KNSSNGSRKRKKKCNFRINH

SEQ ID NO: 28 - protein, 19 aa, Homo sapiens
IRHTDTQQDLQVSCGFLQN

SEQ ID NO: 29 - protein, 19 aa, Homo sapiens
KGREKERKGARKAGKTTYS

SEQ ID NO: 30 - protein, 18 aa, Homo sapiens
MYYPPKTLKGCANPPDYL

SEQ ID NO: 31 - protein, 17 aa, Homo sapiens
KFVKWLKKEEKEVQLQD

SEQ ID NO: 32 - protein, 16 aa, Homo sapiens
KLKDCISTKPISGIVP

SEQ ID NO: 33 - protein, 16 aa, Homo sapiens
KRVNTAWKTKKTSFSL

SEQ ID NO: 34 - protein, 16 aa, Homo sapiens
RTLESAGLFPWLHTQC

SEQ ID NO: 35 - protein, 15 aa, Homo sapiens
KIFKIFIYEGKSEKS

SEQ ID NO: 36 - protein, 15 aa, Homo sapiens
KRKAEDCKGKLEKSV

SEQ ID NO: 37 - protein, 14 aa, Homo sapiens
KARYPKRQAEEGCG

SEQ ID NO: 38 - protein, 14 aa, Homo sapiens
KDDQKIRNGVRRRR

SEQ ID NO: 39 - protein, 13 aa, Homo sapiens
KRKIIEFRIKFLF

SEQ ID NO: 40 - protein, 12 aa, Homo sapiens
KSGTQTLSRIFK

SEQ ID NO: 41 - protein, 12 aa, Homo sapiens
KVVINLKRLQKF

SEQ ID NO: 42 - protein, 11 aa, Homo sapiens
KKEKVLLIQFH

SEQ ID NO: 43 - protein, 11 aa, Homo sapiens
KNGGNGPTQKS

SEQ ID NO: 44 - protein, 10 aa, Homo sapiens
SRKRAVSNSR

SEQ ID NO: 45 - protein, 9 aa, Homo sapiens
KPRDICRIS

SEQ ID NO: 46 - protein, 9 aa, Homo sapiens
KSITTERYP

SEQ ID NO: 47 - protein, 9 aa, Homo sapiens
KVYLHPLCG

SEQ ID NO: 48 - protein, 8 aa, Homo sapiens
KCITHQRH

SEQ ID NO: 49 - protein, 8 aa, Homo sapiens
KKFPNGSL

SEQ ID NO: 50 - skipped

SEQ ID NO: 51 - protein, 8 aa, Homo sapiens
SRKLMSSC

SEQ ID NO: 52 - protein, 8 aa, Homo sapiens
SVEKKDGE

SEQ ID NO: 53 - protein, 89 aa, Homo sapiens
KKGKERQEGQRPPQKFAGLGFLISPSSCSSWGPGSFTRSCGYPTLCSSWISKREPGELSGVWTSAWRTHAAFTGSQDLCLYKGSLGLHI

SEQ ID NO: 54 - protein, 66 aa, Homo sapiens
NLLCVKCSTCPTYVKGSPSCPLRDLQTLWPILALISMSSIWGTMFSCCRLSLVQSSSWPTVLHLGH

SEQ ID NO: 55 - protein, 48 aa, Homo sapiens
KKEKKKQHGCKGETGGSVKCGPEGAKHHAVGCPVQMGCQLLFPADPKK

SEQ ID NO: 56 - protein, 44 aa, Homo sapiens
KKQHGCKGETGGSVKCGPEGAKHHAVGCPVQMGCQLLFPADPKK

SEQ ID NO: 57 - skipped

SEQ ID NO: 58 - protein, 33 aa, Homo sapiens
KMVRLDLLMRYLKAIKRMKNVYLQKERRLKAGN

SEQ ID NO: 59 - protein, 29 aa, Homo sapiens
KKEALFLQEVFQAERLLLQEEQEGGWRRR

SEQ ID NO: 60 - protein, 26 aa, Homo sapiens
KTILKKAGIGMCVKVSSIFFINKQKP

SEQ ID NO: 61 - protein, 23 aa, Homo sapiens
KTLRNHLFLIRWIILTFLQKILK

SEQ ID NO: 62 - protein, 23 aa, Homo sapiens
NCSIPTYVKKRKTTNHSSQMTVH

SEQ ID NO: 63 - protein, 22 aa, Homo sapiens
KRKRKTRRTETPPKVRWPWVPH

SEQ ID NO: 64 - protein, 17 aa, Homo sapiens
KRKKKTTWLQRRNWRQC

SEQ ID NO: 65 - protein, 14 aa, Homo sapiens
KKSWRLLLHSSNLI

SEQ ID NO: 66 - protein, 13 aa, Homo sapiens
KILLNLSCQSCTF

SEQ ID NO: 67 - protein, 13 aa, Homo sapiens
KRRVGDCYFTAQI

SEQ ID NO: 68 - protein, 13 aa, Homo sapiens
KTTWLQRRNWRQC

SEQ ID NO: 69 - skipped

SEQ ID NO: 70 - protein, 11 aa, Homo sapiens
KKAEETEYQLF

SEQ ID NO: 71 - protein, 9 aa, Homo sapiens
KKPSEIISF

SEQ ID NO: 72 - protein, 8 aa, Homo sapiens
KIAAYLPM

SEQ ID NO: 73 - protein, 18 aa, Homo sapiens
KGLMTLSKMIKKKKNLVI

SEQ ID NO: 74 - protein, 99 aa, Homo sapiens
MQTKVMNRRMPRKMQRRLKKVRKIRRSPVVQTVTQRMMSRKSLRRTPRKMPRKLPRKILRKNLLIQRRMQRKMLRRMQRRMQRRMQRRMKRRMQRRRAS

SEQ ID NO: 75 - skipped

SEQ ID NO: 76 - protein, 97 aa, Homo sapiens
TELLQPHAYHAEALHDPVYTGPERVTVSSLHSRQGLLFSALLGGQSPIHLEPAWSFCLLLRNLFSSFPSLQAATKSGHHKQPHHVTICASSRHGSYI

SEQ ID NO: 77 - protein, 96 aa, Homo sapiens
GHVVIKNMTNTVWRMKRNLIICHHLSLVFQDVPLSKEEFPIHRLSPAFGSVGGAPVPSIFLQIITSSNSIIHLKPKLQISNQIGPMEISSEEVCLT

SEQ ID NO: 78 - skipped

SEQ ID NO: 79 - protein, 94 aa, Homo sapiens
KMNMDHQANCLSMSGLTSGGECLMSTMKISLSTVLSQKKSKQQGVPQVSLVEIEFISVKEAAVLVEHAELILQQNCMEKIVNSFLIKYKQKKHP

SEQ ID NO: 80 - protein, 93 aa, Homo sapiens
MAREKRGPGVCRSTNKKPQTGSWRLCRFSKSIKEGCWKGHQCHVGGFGSKMSYWPGCWAKEEIWTICRTCCANHLGEIQREETSSGTSPAGGN

SEQ ID NO: 81 - protein, 93 aa, Homo sapiens
SRWENRLGFCTRGGVYFGTFTVQLLKGETLVNIQVKQKPFMIIVQQLPRAPCLATFPPTMGCREAPSRQVSFRVLRGHSPRRTHSLHLTILAA

SEQ ID NO: 82 - protein, 92 aa, Homo sapiens
DSDQSLVLLQNILLVQSLREVIKSQKSIRRKVRRGDINLTLQNPMLSERRIKKKKIGKVKKTELDKDQNQNTNRLRKRLERILVIGILLAAN

SEQ ID NO: 83 - skipped

SEQ ID NO: 84 - protein, 91 aa, Homo sapiens
TNMENLSRAQNLLNMQQFSVEIKLISVMNVGKLSGTAQNLLGIRESTLERDAMNVMNVGKALQRAQILLDIGEFTLGKDPLVAKNVGEHST

SEQ ID NO: 85 - protein, 90 aa, Homo sapiens
GDTIFSPSVLSMSQSQLIKSTRSSAETTAPKHFLAQRTLKNLTWRELAITVWPQANGLCQWTICQGEKSVWQPWLSCLLCTVFVLPHSLF

SEQ ID NO: 86 - protein, 90 aa, Homo sapiens
KRKKKRRASQMIKTKIKTTQRRKRRKRTKRRKRKRRKAKIRKKRRRKKLWLLIPRETHITTGCFASHYLLCTTGQWLLPEHVLMNFNLIT

SEQ ID NO: 87 - protein, 90 aa, Homo sapiens
NRGALRLRHRLLKALQPPGEPARVCAAIPRTGRLQTGAAPAGLCLPRLDLLCREDSRQLHPPPHQHRPVPAAGHGLPGQGLLRPAAALDP

SEQ ID NO: 88-89 - skipped (2 entries)

SEQ ID NO: 90 - protein, 88 aa, Homo sapiens
ERISRLKESIGNILIVTVTQSLTQILTLMMIKRELKPRRKRRKRNTKQRKRRIRKPKKNPVTQAVKTQKRTCQKLPGWSSQMWQILWI

SEQ ID NO: 91 - protein, 88 aa, Homo sapiens
FTTKQQLCLNAIRVFTSMAATQLSVTVTVLGIPQFQSVLKCRLLPLQNLQRPVPQVLGLLTSLQSQIIQDILNLRKEYLTVWMFGSLL

SEQ ID NO: 92 - protein, 88 aa, Homo sapiens
RGRYHKVPRPMILEKATTLSPPTLVLLPCPGSCRPWQNNWQKITTTRGDGRRSRSWKPKAVGPTPCWSPTTRSRPRRRHEIERRPRSY

SEQ ID NO: 93 - protein, 88 aa, Homo sapiens
SGAGVRPNHHHRRGGHGDGGGHRLPAEPLQSLHAVLHQPPEPEPEAGGRAAADHACPAVQGQVHSAVLHPEGSLQPLPAHLPLCAARD

SEQ ID NO: 94 - protein, 88 aa, Homo sapiens
VHLPIFPNSLAMVIRMSGCSSSSELTQTRGPRRPPGHQCYLSPHETWKVPRMQPGSRMQRLLKVLRTPQSLLKAQKNLYLHQHQQSSN

SEQ ID NO: 95 - protein, 88 aa, Homo sapiens
WRSYWLEKMGQVNEGKASKPTEKLFKKKSGERESCMKHIRTLGPRRRQRGSFNSTLRGSPSVRLFSNAWRCQKFWKEAIQQSQIYPPS

SEQ ID NO: 96 - protein, 87 aa, Homo sapiens
AASLPRKPRCCSTNNHWRAPNTAVHLHSFPSLTLDRCPASPLTTAPSLPGYHLILIQQQEACSQPTRNTKTGRDTQVENLPPPSFHI

SEQ ID NO: 97-99 - skipped (3 entries)

SEQ ID NO: 100 - protein, 87 aa, Homo sapiens
YIQVKKLISVKNVENVLVVGIISLFITKAYTLERKCGKNIKQHFINVMFVRKFLKANQVWKCIFERIQVKNHTSVKFAISLLELRKH

SEQ ID NO: 101 - skipped

SEQ ID NO: 102 - protein, 85 aa, Homo sapiens
KSMCKEQELLLNTVDQITQLKELIVLIDKRKNLFCRCCVWVIYTTLMYIIPSISLWKRGVTCSHGTPMDHGKAVPKCVKVFSEET

SEQ ID NO: 103 - protein, 85 aa, Homo sapiens
NHLGPGGLSAGVAEGWGGPLQAAGAPAPRDHRESLPRAPERERVPEQHPRVPARLRGFPAAGAPVSSFPASSASGNHHSLVCFYV

SEQ ID NO: 104 - protein, 85 aa, Homo sapiens
PCRNAKRMGGWNRSLGKGSVAPSSSVFPIIPAQEFCFRRKSQMILEMRMKMKMSHQKKTLRMKSRHLREGCRRKPQPSPQGRPHL

SEQ ID NO: 105 - protein, 85 aa, Homo sapiens
SVQKRVAAVRKSCRDGYTGSYPVFLRPFVTSHIFSKKMMRQRQSHYCSVLFLSVNYLGGTFPVYQKSRNLQRDKIQETFAQKRIK

SEQ ID NO: 106 - protein, 85 aa, Homo sapiens
WESWQMKTIHCNRIAAVISVTAMQCRKKSHCLQDSYITSTKTRKALITFLTQRQDTSKNIIRLSIWPRQASRLKPSAPNSFLTSY

SEQ ID NO: 107 - protein, 84 aa, Homo sapiens
AKKMREKIKKKKEMMKLMNQNPNGENQAMIKIKKKIEMKGRKKIKEKMILKMMMKLKKITIKMNMTLWKQKKLRMKKMIGMRKK

SEQ ID NO: 108 - protein, 84 aa, Homo sapiens
SIKKKKNKEGVGREVLVVVVPVAIAELVVLVVLSLALHTVLAQVVVVLLLGLLLLKGKRDTVGVDLQQSKLDVAGVEAILAELK

SEQ ID NO: 109 - skipped

SEQ ID NO: 110 - protein, 83 aa, Homo sapiens
ARITLGWKEMRSLLCWRTQCPPKSQQSCSSNTTGWGKWSMALWPCLPSCALEPLVLRISRWAACPLPSSRLPAARCTEDTCLL

SEQ ID NO: 111 - protein, 83 aa, Homo sapiens
NHQQPVSGPRRQCHGALWLHRGPGGRLAAGTAPGHQHAENLYHRHGGCQKEVTVHPDEATGGRPHRHHQEVKAAFCALLPACS

SEQ ID NO: 112 - protein, 83 aa, Homo sapiens
NPTGKRDAFLSGFRDRPDGDPGHEGRDPQDEGQARAAAEAAGEDDPCHGVGGCPQRDRHHPGRGAAQDGQEGAHPHRLPPQAA

SEQ ID NO: 113 - protein, 83 aa, Homo sapiens
PPIPLPLPCSPPLLRRPCLPLQPRGPPLPPPAARPPPAARPPGVQQPQSEPLRGQPPPPPPHPPLPSPPVPLGPWNGTTMMAT

SEQ ID NO: 114 - protein, 82 aa, Homo sapiens
ARAEVVVMNEREAKVRNGSEVETEKGKRAKAVKESEVEAKRGDGAAQEVEIEDLEAATEVLTPDQNLTVPSEERLGCLIASN

SEQ ID NO: 115 - protein, 82 aa, Homo sapiens
PTVGRSLTSAGTVGRPSRPGTVSVCISLSTPGRSLTNVTAVGRPSSLSIPLPSMAESTLGRSHMNVRSAGRPSVGVQTSPNT

SEQ ID NO: 116 - protein, 81 aa, Homo sapiens
ARLLASITGSASTWRRRRVWLTITVTSTMGLGILTPMCWQCSSTGTATIRKWALLSSAAALSLSLHSTPCASSPGQAKCAS

SEQ ID NO: 117 - protein, 81 aa, Homo sapiens
ARYQPCITLTKMPNYLTCFSRQAAQQQGQLPGASQGCLSVHPLRTSAESVTAKGMKRAPSSHPVAALGHCALSTSPASTSG

SEQ ID NO: 118 - protein, 81 aa, Homo sapiens
IQGKNLLNAMTVEKPIAGRHTLQLIRKFIMERDPLCAMIVGRRLCIKPNSWSTRDFTLERSLMSAVNVGKHSLGTPHLINT

SEQ ID NO: 119 - protein, 80 aa, Homo sapiens
FRRKAMGHQMDFMRKLIGKDITHLSWMKKATASDPRNPALPKESTFILQVNRKKKKNHIRNLISRLNHCNLKTFLRMLQL

SEQ ID NO: 120 - protein, 80 aa, Homo sapiens
NHPSPYHYHAAHHYYDAPAYHYNPEAHHCHHPPHDHHPPHDHQASNNHSPNHYADNHHHHPHTHHSHPHLSPWDLGTARR

SEQ ID NO: 121-122 - skipped (2 entries)

SEQ ID NO: 123 - protein, 80 aa, Homo sapiens
YMILIESPKVRTEKTTKSWKAKYLLSWLSSLCVLLHFILPEFHILTVKPTIRLTVDCKINCLLLKKQLSFWQQLTFVWIP

SEQ ID NO: 124 - protein, 79 aa, Homo sapiens
KQLYIQNALNLSRPHSARLTASDTTRTRTCRTWRRSSASAASAWRRSFAASCTRGTSCTPWRAKISTMSTYREKLSGFP

SEQ ID NO: 125 - protein, 79 aa, Homo sapiens
WRNWKKEVMVKNQMRKMKRKKEAKRKVKKVMMTMTMMPQNRRNMMKKSKKRKMTTLIHTLKMEMILAQTVMTTWMRQPI

SEQ ID NO: 126 - protein, 78 aa, Homo sapiens
ARAEVVVMNEREAKVRNGSEVETEKGKRAKAVKESEVEAKRGDGAAQEVEIEDLEAATEVLTDDVPEAKVHSEKTRAL

SEQ ID NO: 127 - protein, 78 aa, Homo sapiens
HQKQKDGWCLQNLVASYLLVQDITVKSCLEKLWKYPDTMSKLLILYQGLKETQWLFVSLNMFILQDQTVCSKTKWFIQ

SEQ ID NO: 128-129 - skipped (2 entries)

SEQ ID NO: 130 - protein, 76 aa, Homo sapiens
NTRGHVLSSLGRRAAREHGQPATGVPGSESRHRHHDPPAQPRPVRRRGKQGEHPGGRGKQPGQSVPHGPRLAPLAV

SEQ ID NO: 131 - protein, 76 aa, Homo sapiens
QPLKTKSYSQRQKHQPQKNRNMTYLNLKYKLLKKSLKAEWLQRQCKKGNNHRPRWKVYHLAHLRVYLKKMIRQPKQ

SEQ ID NO: 132 - protein, 75 aa, Homo sapiens
HKQKLSKKWLHYNILTHNFWSNLKLKDLHRNKLSKFSLLPHLAPLSSDPSLFQDKVQCLRFLKVFNSPIHLSRCQ

SEQ ID NO: 133 - skipped

SEQ ID NO: 134 - protein, 75 aa, Homo sapiens
PWSGSTSMNVTGTLAVLCPTLSWAMNTISEFTPRTSVGSVTHLVSPRTRPASSRQESPSNRSSIRSMTSGWLPSS

SEQ ID NO: 135 - skipped

SEQ ID NO: 136 - protein, 75 aa, Homo sapiens
TPETISDQQPEISQARNERGHCECAAECPGENQGTLDAPWKIICPACGMQVGESTSLPGDHATIFRKAGLSDAVK

SEQ ID NO: 137 - protein, 74 aa, Homo sapiens
CSQRRWIHLMRYATAFLCNSVDNMISQCLQFECFLKCRKLVLTPMPLLMVIIIRLFWKVPGLQEVVVAIFFGQK

SEQ ID NO: 138 - skipped

SEQ ID NO: 139 - protein, 74 aa, Homo sapiens
IMTSISPYSPRSKSSPARWRGVHGPWRGRRRRKRSTRMTRRRGKTRRRRRLRQRLPRGPNMTMPTPRCLMTPRS

SEQ ID NO: 140 - skipped

SEQ ID NO: 141 - protein, 73 aa, Homo sapiens
AASLPRKPRCCSTNNHWRAPNTAVHLHSFPSLTLDRYHLILIQQQEACSQPTRNTKTGRDTQVENLPPPSFHI

SEQ ID NO: 142 - protein, 73 aa, Homo sapiens
CVLFRVSTAETLKGVSLHHFILQLGITECPWWNICYSMELMCMLKIKEALYLCTMHVLMDIMKLQNFLLNMEQ

SEQ ID NO: 143 - protein, 73 aa, Homo sapiens
FTTKQQLCLNAIRVFTSMAATQLSVTVTVLGIPQFQSVLKVLGLLTSLQSQIIQDILNLRKEYLTVWMFGSLL

SEQ ID NO: 144 - skipped

SEQ ID NO: 145 - protein, 72 aa, Homo sapiens
AGRKNNTFQNVKRHFVKDLGSHQELRVQLQRLILHLMVQILDGRQRSKHGWIDMKKQITTSTVRVFRGRHKE

SEQ ID NO: 146 - protein, 72 aa, Homo sapiens
GLQCSIRCSRSCTISVCLNRSCDWNNSDCCHLCGGPLHHKEMPQKQQNSQTEAKYRALQFRQYNKSVHEVNL

SEQ ID NO: 147 - protein, 72 aa, Homo sapiens
NRLVPGVARFLCQTHLQLGGQECAAAPEQLGHAQYQQPQLPHPQEVLPGCGGVRPRLSRRGGAQDLPETCHL

SEQ ID NO: 148 - protein, 72 aa, Homo sapiens
QQPIHMSSWCCTKIKFTTSRSVIRRKVKFTCWELDSEGKRTFCLCQILLTTSGKCHFCSLMGKTEVPDTSAH

SEQ ID NO: 149 - protein, 71 aa, Homo sapiens
ETTQRGYRTLQKMLKLRTHPGKDSGRTSTVFGRETQSLTKRPEQALTRPWRQPPRSRARQQRKICLMHVNH

SEQ ID NO: 150 - protein, 71 aa, Homo sapiens
ILTPFSRRAALRRAAVHATSDGSCPLAAWNTEPGDPARHPAGGGAARPLYVHKSPPAASHGLLIGGDGKFQ

SEQ ID NO: 151 - protein, 71 aa, Homo sapiens
NRGPTCPQLQRRGPGEGQDQGQGPRAACGEAPCGQEGPAGQQPPAQGRAAGRDQEEAIFGHSCGHLREREA

SEQ ID NO: 152 - protein, 71 aa, Homo sapiens
PPRALPAVQRRPHLNLPRCPQQSLPEKWQYQSPPEKSRCPSRRPLPHRPLQPPQPLSLHPQVKMSPVPHCC

SEQ ID NO: 153 - protein, 71 aa, Homo sapiens
SRPRFHSAADLHYSVSLLPTGGRPIFQLFFIPQTDNEIFTRKCCSVYSSPWHSFHYCTDHSLEFTYEVNWK

SEQ ID NO: 154 - protein, 70 aa, Homo sapiens
AERSGEQCRSLTVYSEKNKRRQNESSPFPCKPEQLVVWEPRGAQRRTARTSSSSWGAVRGAGRPGPAGAG

SEQ ID NO: 155 - protein, 70 aa, Homo sapiens
ILPKSTWDLPRRRLCQTQANGFMKKSHIKWICSMKMVLVLVFMKMYAKQLVTSASGLLLLEFRTSMKSSS

SEQ ID NO: 156 - protein, 70 aa, Homo sapiens
TDGLHGRNGGARSHQGEWTVPPASEESLPFPPQYRQWTHRGRLGRKKQETSEAPVHPEVVVCAVSVADHE

SEQ ID NO: 157 - skipped

SEQ ID NO: 158 - protein, 69 aa, Homo sapiens
GHASCGRISWMGRRTGSCGFPWPARRGSPRPPTFFRFDRMCTQKSQILTFTTSWELLPEKTATPRSARA

SEQ ID NO: 159 - protein, 69 aa, Homo sapiens
HRPASSTGSAAWTWTGTAPCPCSSSSTSTRSSAEGWTAWPSRPCPSRTASARCWTWSSRGLKGRSRCRT

SEQ ID NO: 160 - protein, 69 aa, Homo sapiens
IRTAPDGMEMKWPKEQRDAKGAEMPAARGSKSWPLQLQKLAASCSSPRGTGQAPEGLLGGPQRERELLS

SEQ ID NO: 161 - protein, 69 aa, Homo sapiens
LTNAMSVGRSSLRIHTLQDIGEFILERNLTSVMSVAKPLVKLQNLQGIREFIPERNHMSVGNPLVSVQA

SEQ ID NO: 162 - skipped

SEQ ID NO: 163 - protein, 68 aa, Homo sapiens
AGVRKKKEGPGAEAGGHQRKTHQRKRSTKEGLSSLTPSCPCTPLMCWTCPWTQTNPRTACATRSPMGR

SEQ ID NO: 164 - protein, 68 aa, Homo sapiens
FKNGWKMRNINLVQLQRAMVMPMENLQVFTVEIPIQNQPFIIQFRGNQFICHLPKKLRIYQEGRVKDL

SEQ ID NO: 165 - protein, 68 aa, Homo sapiens
GSISIIRKQRGSMGRRVAAGLRQTPILKRTNLPEALEAVKRNLRNRIKEIMLQLILDIALFGLRTFRL

SEQ ID NO: 166 - skipped

SEQ ID NO: 167 - protein, 67 aa, Homo sapiens
DLEQDHVLPSTIRHPSPGLDHTQKQSILFPVPIGQCGGRGPAPGPLGGEPTPLRDGGKRGVCPLPTA

SEQ ID NO: 168 - protein, 67 aa, Homo sapiens
DRERKKKRRNLVGIHLLLHQALILPAVLLILKMRIRNKENGERKRRTVHINLLKAPCQKLNQTVRIV

SEQ ID NO: 169-171 - skipped (3 entries)

SEQ ID NO: 172 - protein, 67 aa, Homo sapiens
LQNLIQWKICSSTSIQSHGKKILRICIWTPLGIEAGHTMTGSQKLTWIGSMMMPSVTVALPGITRSI

SEQ ID NO: 173 - protein, 67 aa, Homo sapiens
LTRMLSLLTLMKQLCEQPKTSSPSSLKNVVVSKVKKITDHCLKILFKTFFQQSISLNGQLLNYSLVC

SEQ ID NO: 174-175 - skipped (2 entries)

SEQ ID NO: 176 - protein, 66 aa, Homo sapiens
GNWSIMLKRPMVKMMKILMIKIMMEKSKKFEMTTAPKAERNTTRRKKRRKKTGLQLLRNHIEELKC

SEQ ID NO: 177 - protein, 66 aa, Homo sapiens
HKRISSVNKLCTRQYWKRMLKILCTSTLCLRLDTSQSVIPKRKKTFIRFPPAKRRKVFMMCQKVNL

SEQ ID NO: 178 - protein, 66 aa, Homo sapiens
NKAHAAQWLPEVPGPQRQGAGSAADVQQILLCRDRSQCFLQEPQSHRGKSCPTGHQSHQPQCQAAQ

SEQ ID NO: 179 - protein, 65 aa, Homo sapiens
ASPSLRLSTVRSTSRLSTSSWWPWSLWSRTTSWFCSRRALTTLTHSCSSAMPAAFKRIRRWLETS

SEQ ID NO: 180 - protein, 65 aa, Homo sapiens
ERKEEKRRNSNRVKQMSSGILLLRKFPRNPPMLFVTLNMIFHCQTQYRRIHEKKIGKSGDKEMSS

SEQ ID NO: 181 - protein, 65 aa, Homo sapiens
GRNQLIQKARIPLPIPPLLQNHLQKVNLNMREAEGGNIRGGQKLNVLKRGERKQAVQKSQGINMQ

SEQ ID NO: 182 - protein, 65 aa, Homo sapiens
NMIHLILPGMAELGFARADYQVAPPCLIKMEYLLIQLAANSWREPMEFSRETKISNPSLPFQSTC

SEQ ID NO: 183 - protein, 65 aa, Homo sapiens
SLFNLLLTCDCCLYLLWKLHLHVCENISKGRSCFDKRSSYTQYLCRSYAESIYLHSKKPAGETSI

SEQ ID NO: 184 - protein, 64 aa, Homo sapiens
GDKQRTLFLGITDSHQQYLPTYTLHVTTIFPPLEKTMELDSSLPEYNMFPRKGRGLPRTNFQSH

SEQ ID NO: 185 - protein, 64 aa, Homo sapiens
KTTMKQLQCWSRRFHLNLKVRKKMKLTLAVLPTLRNLHCYPQLCLQGRLAARNANMNLEILLGV

SEQ ID NO: 186 - protein, 64 aa, Homo sapiens
NHLGPGGLSAGVAEGWGGPLQAAGAPAPRDHRESLPRAPERERVPEQHPRVPARLRGFPAAGDV

SEQ ID NO: 187 - protein, 64 aa, Homo sapiens
QGPYADRRKMNVIFLRCALATRLPVLRTSSGSMDFLARTQKATVSWGNVQLVRISALNYLMMRQ

SEQ ID NO: 188 - protein, 64 aa, Homo sapiens
SFGHILQGVKRNLSYFVIYQSHRNHISATEIDSHQNKSLSTCPSWVVTTYLMSNGTNNLRMEIH

SEQ ID NO: 189 - skipped

SEQ ID NO: 190 - protein, 63 aa, Homo sapiens
FHLSQPLILVLTKKELQRTWLIKKNLQLTLEVKDWKQPQSLKSSATSPVQSKKLKITQKSIII

SEQ ID NO: 191 - protein, 63 aa, Homo sapiens
ILPSSSAHVFWFCLWKLLWQLSILSFCFSTIPSRYAAYSGRKLIFPTIGSSQLSTSFQRFCQY

SEQ ID NO: 192 - protein, 63 aa, Homo sapiens
ILTSPAIKSSASHGRDALRAPVFVNYRISAQRMALQCVQLTGEASQHTVNKRVWNVFIQGQSF

SEQ ID NO: 193 - skipped

SEQ ID NO: 194 - protein, 63 aa, Homo sapiens
KKRKKKMVKRKNPKRRKLQELLKRRKLRKNSNLSHMMIRFFWMEMRCMYGSMTQFTLKHLSWD

SEQ ID NO: 195 - protein, 63 aa, Homo sapiens
MMTTFPHPRTKTLILPKSLWMTFSPMMKTTQGKESSSSTAVQPRLPSRAATRSPRGCGRSTTW

SEQ ID NO: 196 - protein, 63 aa, Homo sapiens
NSAEPCEWHVITTVPSEHIGQGRCCGALYPGSQCRKLSCAGGPYKAPVSQYCLKCCSWKIQIR

SEQ ID NO: 197 - protein, 63 aa, Homo sapiens
SWKWLTKSRMKNEWYNLKRVLVPFLAPGARGLLCCLQRHLREVVAFWENSWASLLPHSSSFFN

SEQ ID NO: 198 - protein, 63 aa, Homo sapiens
TFGEELSITNRQTGRLSWMEFFTMPPRTWFMRQLQRMWFLRPSMAIMAPSCVMGRRELARHTP

SEQ ID NO: 199 - skipped

SEQ ID NO: 200 - protein, 62 aa, Homo sapiens
ASQVCSVSLPRLPSFTIYFCMAIPSLDFSLMSSLTFIMRLVCTWKTMACMKSFRGLFWGCSW

SEQ ID NO: 201 - protein, 62 aa, Homo sapiens
NASTYSGPGRTARRGGRGSAKAAAGKGDSRGQDQEDGRGDSASRGPKFQVHQRKETHGRSHC

SEQ ID NO: 202 - protein, 62 aa, Homo sapiens
NIICHVFTHIHCDNGGKPPHLGDYYWQPLLGLPNVLLPCLLVTYGCHIFHCHVTQIDDRLTL

SEQ ID NO: 203 - protein, 62 aa, Homo sapiens
PSPSSSFRTEQTATRSWVWTRSQRRAKAKQALISKSSPHSHSLAALIRKVRNSNNSGTFSSR

SEQ ID NO: 204 - skipped

SEQ ID NO: 205 - protein, 62 aa, Homo sapiens
WKRGSNNTQREVLEDIYPSRGILEPRAREAEPAVQPHPEHADQPDGGGGQALQYKPSELLRT

SEQ ID NO: 206 - protein, 61 aa, Homo sapiens
KLPQRNKNLCLRKLQDLTWLKEKQKHQILKVNKIKLLLQKKKMDVMQIHLKAHQQQKVKKA

SEQ ID NO: 207 - skipped

SEQ ID NO: 208 - protein, 61 aa, Homo sapiens
LHHQAIVKSLERTRMTLPLILQCSPHPACTPLWTNTCCPERSGSVAQSHLLVSVHQSLPAF

SEQ ID NO: 209 - protein, 61 aa, Homo sapiens
LITPSFAASTPKGRSSQAALPGSCGSSHLSRPRPTRWTCPYTSWDGTRPSSTSREWATTPI

SEQ ID NO: 210 - protein, 61 aa, Homo sapiens
NPPEGANCLSEERVYSAILLHTVPHWIYSSTCPPTASSHQENLFKLLKRHFKSKGCDQCPV

SEQ ID NO: 211 - protein, 61 aa, Homo sapiens
NSYWGRGLQCPGWRGGYFGPSHCCLCEAVSSCSSLRPNRSANPNKIFVYLIGSSRERSAVP

SEQ ID NO: 212 - protein, 61 aa, Homo sapiens
NTDQHRVLVPLHGPGRGRRPVHVRARVLLRGAVPKAGQHGHRGPALPGLPLPDAGPGQAED

SEQ ID NO: 213 - protein, 61 aa, Homo sapiens
QPKKRLDPKGVRCPRNRLSLPLLQEPACPQPWAVPHLPRPHCQLHPTVLQLRTRKQWPNVR

SEQ ID NO: 214 - skipped

SEQ ID NO: 215 - protein, 61 aa, Homo sapiens
SERCLLVCLLLYMHHPQIQMISTVNLLVIHLLSHQPVCSLALSLCKMGPTILLTFGVHQMG

SEQ ID NO: 216 - protein, 60 aa, Homo sapiens
CRFIGPMLRCSLPLLLNCHILVLEKEVSLGLDLQLTLSTLFTTEKKLLKPTFVIPCKSLK

SEQ ID NO: 217 - protein, 60 aa, Homo sapiens
DKQPSNWKPTGVGPWLGRQSKGESGPCGLSESSLKDSSVATNPSVLTTRNLSCLCGRITS

SEQ ID NO: 218 - protein, 60 aa, Homo sapiens
NRPQDLGIYRRAAWKMAVHRDTINLFSSLSFAKYSPGDLYGKQSCCDVQLPRPCNSKESG

SEQ ID NO: 219 - protein, 59 aa, Homo sapiens
CSINGSSKRTTRTRQTMQEAPDFLFLVKDQLLSRIAPSKLSCLGKLQSMLLDRPRLPKL

SEQ ID NO: 220 - skipped

SEQ ID NO: 221 - protein, 59 aa, Homo sapiens
GSKGRRKETGPRNRYFQEKEEERTGGQEIQKEVRSQYFVKWTDWTGWKIQKWNTDSEPS

SEQ ID NO: 222 - protein, 59 aa, Homo sapiens
KNLSNPRWNLNQVYLMILPFQRMTVKGYIPTAEKRNKTLKVQEREQGRTWGWSMALRSP

SEQ ID NO: 223 - skipped

SEQ ID NO: 224 - protein, 59 aa, Homo sapiens
NQASCTNQKTQEEEKAWTSSTPKTHSTCSPPREPQHARQRLTASGGLSHPEPIHARAEC

SEQ ID NO: 225 - protein, 59 aa, Homo sapiens
RRKLKKKMLQEKEKHYKLLKNGKRKRWNILKRKIERRENMKEQRNRKRRKLLPRKRKII

SEQ ID NO: 226 - protein, 59 aa, Homo sapiens
SPSQAVSLGRSTHLSQIQPRPVNTYWTSAQPSMGLMHRWALGSLPMFYLTMISLCKWPI

SEQ ID NO: 227-228 - skipped (2 entries)

SEQ ID NO: 229 - protein, 58 aa, Homo sapiens
DLEQDHVLPSTIRHPSPGLDHTQKQSILFPVPIGQCGGRESQPPQGRCARSPVRAARQ

SEQ ID NO: 230 - protein, 58 aa, Homo sapiens
EGRGKEKNLIKEKVKKQYLTAKVWNPAKKSQSNEKTNSSRRSEKSKINRNRYQSALYT

SEQ ID NO: 231-232 - skipped (2 entries)

SEQ ID NO: 233 - protein, 58 aa, Homo sapiens
NGDYVSIYCNFRGECSPGSHFAKRLCTVRKSMGNPPRGFTDRFSKTGRSAEPHSGRDT

SEQ ID NO: 234 - protein, 58 aa, Homo sapiens
NSGEFKTFNSAQAFIASSSTQDSNKLQCSSKNHHYSDSTNAYAIGKAATNYQFTTCTH

SEQ ID NO: 235 - protein, 58 aa, Homo sapiens
PSLNLISHQSSVGCSKGIWRAPEMTLFSTPTFAASSPWASMSWVSSGCSLPLWSSSCC

SEQ ID NO: 236 - protein, 58 aa, Homo sapiens
QEKLQREKENVSLFVVLASRNATAGNMYIITAMLTPAVRYGNTKSQSLTKSLVNSIKN

SEQ ID NO: 237 - protein, 58 aa, Homo sapiens
RAKFMYLFEGAQTVRNRDDCLDDNALRCPPQFHRWPGDWGFLHLVSPSGTQYFHSNPM

SEQ ID NO: 238 - protein, 58 aa, Homo sapiens
RSCGTLFSGLKMSSTDGVMGRRCLLMNSLTKRKPTWKLSQWIKILLLPMINQQPQLEL

SEQ ID NO: 239 - protein, 58 aa, Homo sapiens
TRRNRKNPRRKKSPRNPRPRKPLRFPKSQRKRKQKLPRQNPNPAKSQVIRNLTQKQVL

SEQ ID NO: 240 - skipped

SEQ ID NO: 241 - protein, 57 aa, Homo sapiens
EFSLSFYLYIMSMVFSKLVLRLGDHLFFCLKTTLENLPQKTIPSSELLTSLTGSGIG

SEQ ID NO: 242 - skipped

SEQ ID NO: 243 - protein, 57 aa, Homo sapiens
QDLIHMERISSPLVEFVKVLCTNQVLITARAVPTKKASVRCVEKRFWIPKTTSKHLS

SEQ ID NO: 244 - protein, 57 aa, Homo sapiens
SHWGNHQDSYILGGVYFGISTVQLQRDVKHVNTQVKQKPSMITLLCHLGTLEVQGPH

SEQ ID NO: 245 - protein, 57 aa, Homo sapiens
YLTACRGNIQITAMERSRTNVQSVGKSSGSARSLISIRESTRERNPLNALSVEKPSA

SEQ ID NO: 246 - skipped

SEQ ID NO: 247 - protein, 56 aa, Homo sapiens
FCQGKRKLNKRKKKLHSNFKKNCDGEEHSYMLGMSCLGSGDLHGNGHYMGNPLQLS

SEQ ID NO: 248 - protein, 56 aa, Homo sapiens
LFTRQLISVRCLYPQLMVISILLWRSQLLALILKQARKRIRTKRKSLSGTTELLCL

SEQ ID NO: 249 - protein, 56 aa, Homo sapiens
LLRRNEKNRKKKNTKLENKYFNKENRSLKKLLKNSSVPMFLFHSGGKQFPENQFLH

SEQ ID NO: 250 - protein, 56 aa, Homo sapiens
LSTDWRLQPSRPQRQPHRPSPPPRMQLFPTRTLRPSSSWSRVARQWLITSLSWSRE

SEQ ID NO: 251 - protein, 56 aa, Homo sapiens
SAGKSGTSSRRKKAGRRRRNISMAWRLGCQLALLRIRSYRGKSCISRSKTCPSWSN

SEQ ID NO: 252 - skipped

SEQ ID NO: 253 - protein, 56 aa, Homo sapiens
WQLKTSPQRLLEEVMPKKGPGPGLWVCIMAADCSAAHLSSAVTGWCPPHTACMGET

SEQ ID NO: 254 - protein, 56 aa, Homo sapiens
YRKLRLPVFATRSYRKIVCSSCVTERKCATQEPGQSYEGDFSDTSAGSTDAQDSKS

SEQ ID NO: 255 - protein, 55 aa, Homo sapiens
APFSPKVWRTARGASLSCQTTPPITLSSTPTGMTNAWLLGDAPRTLTNTRCHPRR

SEQ ID NO: 256 - skipped

SEQ ID NO: 257 - protein, 55 aa, Homo sapiens
EPSPKSWLPSSLAPPSPMSTFPFNLEIHHLLPWDSILSLWITSTSGHKASISGAS

SEQ ID NO: 258 - protein, 55 aa, Homo sapiens
FILERISTNVKSVEKPLTGPQTFLNLRKFILEKNPTNVKYVEKPFTNPQSLLNIR

SEQ ID NO: 259 - protein, 55 aa, Homo sapiens
GKTRCLIFIDLQQEEAILGERSMPFIVVTQLLLMRNALKEGNQRAWQEQEIDVCL

SEQ ID NO: 260 - protein, 55 aa, Homo sapiens
GPRTPQPSRSRTLGSVRPGRPGMLGTLAQWGRRMRNRQPWGRNGSGRAPENTMGR

SEQ ID NO: 261-262 - skipped (2 entries)

SEQ ID NO: 263 - protein, 55 aa, Homo sapiens
PQKMLKEGMALVYLREVNLIVMRKKKTLKMLRLQVVGKSPEVHPQFLKKSTVTLR

SEQ ID NO: 264 - skipped

SEQ ID NO: 265 - protein, 55 aa, Homo sapiens
TTAAEAEAGISPAILCSRRQRQQGRVLRRPGQAGLPEPPEPVRWTVLTAPLLDTQ

SEQ ID NO: 266 - protein, 54 aa, Homo sapiens
EKSVKEIKCFLTMNLNIAKVLLKTKVYFMYLTSLSKNPKIFMHRNLKQKWHLGI

SEQ ID NO: 267 - protein, 54 aa, Homo sapiens
FCQGKRKLNKRKKKLHSNFKKNCDGEEHSYMLLMWSWIQTPLIPSSSCQRTGEV

SEQ ID NO: 268 - protein, 54 aa, Homo sapiens
IRGKCCSKQGETKSQVIAQRSHSSSSQNTLWGSSHYREGPSRGGSGWSGSCPQG

SEQ ID NO: 269 - protein, 54 aa, Homo sapiens
LKDLIWFRSQVIMLDWDPCLPSFTPVPTSRLSAGLKKLSKKANRPFLSSILLFT

SEQ ID NO: 270 - protein, 54 aa, Homo sapiens
MFIVFSMSVTLRLNKMKKPKSLLLELDGKRQSKGGEGLLQLPASGRGRYQKRRG

SEQ ID NO: 271 - protein, 54 aa, Homo sapiens
SVSRKAGLVSSTKPLVQLGFTLKRYRSFLNIEFLQTPKLTRKLSEWSRRKLLTC

SEQ ID NO: 272 - protein, 54 aa, Homo sapiens
TCFCKNGLNLHLVLFVLHLPAKYDLEQQGSNTIVCEKVCFLKGASGAEMASNGK

SEQ ID NO: 273 - skipped

SEQ ID NO: 274 - protein, 53 aa, Homo sapiens
EARSPGDWVPGPPASGVSLTACEPPASQVPSGPLLTSLTPVPSPAPGHLLCFQ

SEQ ID NO: 275-276 - skipped (2 entries)

SEQ ID NO: 277 - protein, 53 aa, Homo sapiens
HLKKRLEPKGVRCPKSRLGLPALQEPARPQPWAVPHLPRPHHQLHPTLPQLRA

SEQ ID NO: 278 - protein, 53 aa, Homo sapiens
KGTLVGQHLRAFYLTVSTRKLWRTQKSQVSMNAPLRKMLSRRAKAGGSSPGRL

SEQ ID NO: 279 - protein, 53 aa, Homo sapiens
KKNHKDREKKKRNLILMIKVHKFEHHLLPSPLHNLSKYTDKLQKARMLLPPKA

SEQ ID NO: 280 - protein, 53 aa, Homo sapiens
NLPSQQWNGVSGSPLLVENASQLHCRKGISQLANPKWAYCHKGTSYSNWTSNG

SEQ ID NO: 281 - skipped

SEQ ID NO: 282 - protein, 52 aa, Homo sapiens
IAVSCAGRKWDLLGLNAGVEMFTVVYTVTQMYTIALTITKPMLLRKSEKKIQ

SEQ ID NO: 283 - protein, 52 aa, Homo sapiens
NQQTKVKRSQTAMRKEKERKKRRKRLKRNLITQKRVKIHRKLKMKNKQRKKK

SEQ ID NO: 284 - protein, 52 aa, Homo sapiens
NRWTANHYCMHRKPSVPSKKFLEWSLEVRMEVYNHSFNHSSGWHLENSGSLL

SEQ ID NO: 285 - protein, 52 aa, Homo sapiens
QQPYQAWPQELGEQRYSGADQRYRCFWLLQTQQESGFRGRQTQGQKGWRSQA

SEQ ID NO: 286 - protein, 52 aa, Homo sapiens
SHWGNHQDSYILGGVYFGISTVQLQRDVKHVNTQVKQKPSMITVLQQLPVQC

SEQ ID NO: 287 - protein, 52 aa, Homo sapiens
TRPYKIYHQPTHLWEQETTFQLDQITALSTAVKPITSTANRCVYIHTLLCLA

SEQ ID NO: 288 - protein, 51 aa, Homo sapiens
AQILSSAARASDAFVIKRCLDPKRLSPSSDSSAVSGCNPSCTPRSRFWSFW

SEQ ID NO: 289 - skipped

SEQ ID NO: 290 - protein, 51 aa, Homo sapiens
DSVQKEKERARVERNGMEHNEARTKHKSEAPGGTQMEKYPVCISGRETFSL

SEQ ID NO: 291 - protein, 51 aa, Homo sapiens
FTTKQQLCLNAIRVFTSMAATQLSVTVTVLGIPQFQSVLKCCLHLVQNLQL

SEQ ID NO: 292 - protein, 51 aa, Homo sapiens
KEATVFDFLLLLLLLLFLADIPLVSTVRASQKELCFECQFCFELLSGGPSL

SEQ ID NO: 293 - skipped

SEQ ID NO: 294 - protein, 51 aa, Homo sapiens
KQRHVHRAGLLHEDEVHGHQQRPYCQPQVSHLEGLALHGPGESLQQLPSSQ

SEQ ID NO: 295 - protein, 51 aa, Homo sapiens
LRMQRFFIICANSSSYRIEAIIFFHFCGNLLHPSLNRGLRSIITWICFGIS

SEQ ID NO: 296 - protein, 51 aa, Homo sapiens
NLPYCQLSTTGNDLTDEKASRFFTFPIITNRGNKRRNNCKSTPHFHGTCTR

SEQ ID NO: 297 - protein, 51 aa, Homo sapiens
NPREVQPLLGCGQSEQASCRSILYGSPNLSPNCNSRLLYYPTFHDGIRWEL

SEQ ID NO: 298 - protein, 51 aa, Homo sapiens
NTLQISAIRPSGHPNKHKATAQEKPQESRRRGRIFSIQETNTISRQSHAHA

SEQ ID NO: 299 - protein, 51 aa, Homo sapiens
PSRPQQQAIQTQISFEKPRYPSKRRVMEAHSKRTCGSIRIVRRTIKRDSIH

SEQ ID NO: 300 - protein, 51 aa, Homo sapiens
REKKRHCDRHLIKMIDLSKGRMLKILDWLLRFTKTCRKPALLEPFLILRWL

SEQ ID NO: 301 - protein, 51 aa, Homo sapiens
TMSTFGSPQILVVLMNLLNLQSLKGISLVCCVNQVVFHPQISSGRRKALQC

SEQ ID NO: 302 - protein, 50 aa, Homo sapiens
DIKQTGTRWNLCWELWNTNLVHKGTSPRNVLLQTTPQPSRLMSTSMKSLI

SEQ ID NO: 303 - protein, 50 aa, Homo sapiens
EIRCVQAVVILCSELSSVHEVLSSCVALFKGAREHICLRETYRLISTIAI

SEQ ID NO: 304 - skipped

SEQ ID NO: 305 - protein, 50 aa, Homo sapiens
ETSRGREKEARRAGQTSARRRSSCSDERKRRIHSASSGSLGTTSFKKGTS

SEQ ID NO: 306 - protein, 50 aa, Homo sapiens
FILERNPTNVKNVAKPLDGPQIGVNIRKFIVQINPTNVKNVTKPLNNFRS

SEQ ID NO: 307 - protein, 50 aa, Homo sapiens
KPNCDCRLVQEICATKEVPADKEFRLSNSVLYPGLEGSKNSAGTEASKAL

SEQ ID NO: 308 - protein, 50 aa, Homo sapiens
LIKEKVKKQYLTAKVWNPAKKSQSNEKTNSSRRSEKSKINRNRYQSALYT

SEQ ID NO: 309 - protein, 50 aa, Homo sapiens
MWECKIVPKMGSLYQQTLFGILKKMELFFTHTQDCVLVLIGHRRADLMYK

SEQ ID NO: 310 - protein, 50 aa, Homo sapiens
NQEPKEETESNRTTERTSSNWKTARKKSVGENSERNSPSPGAGRFGIGYL

SEQ ID NO: 311 - protein, 50 aa, Homo sapiens
NYRLCHAGHHVWLVHYGDLICGILCEAKSGGCPETPRILEIPAKQAEESR

SEQ ID NO: 312 - protein, 50 aa, Homo sapiens
QIRKFILRRKDMNVENVGKPFTRVRTLSITKEFTLARNPMNVRNVARPSQ

SEQ ID NO: 313 - protein, 50 aa, Homo sapiens
RFRNAEVHQTSGDELVACSLISVNQGSTNSDRGDVRRHPASCLGAPAQHG

SEQ ID NO: 314 - protein, 50 aa, Homo sapiens
RKSWKMKSPVDTVLSKENQICKVKTILAPAPHALSLPRPQPFFRAIDKDR

SEQ ID NO: 315 - protein, 50 aa, Homo sapiens
RWATWEKWRCKVPPGRVDSPSRLRRKPTFPTSVQAVDTSRETGPEETGNF

SEQ ID NO: 316 - protein, 50 aa, Homo sapiens
SSRRGKLLIRGKGLLSYSAPHCASLDIQFHLPAHRLLSPRKLVQVAQKTF

SEQ ID NO: 317 - protein, 50 aa, Homo sapiens
TLVVKNDFLATVAVMENCFFGDKHFISSQNSWLMNLLVLKTLILSSAMSH

SEQ ID NO: 318 - protein, 50 aa, Homo sapiens
YRKSLFQKSRRWTSGLWTKGRSALTLRVAIMKRPKNPIRQIRKKERKQIE

SEQ ID NO: 319 - protein, 49 aa, Homo sapiens
CNPALPVGICSQCPEPVHLCGPASTEQSPCGRHPSPESPTVHRCGPSAG

SEQ ID NO: 320 - skipped

SEQ ID NO: 321 - protein, 49 aa, Homo sapiens
GNGSGGIKKSSKKTISFLQALIFLGSHTRQTKVMHLPTESRTRLETMMK

SEQ ID NO: 322 - protein, 49 aa, Homo sapiens
GRRSISLLRSHQRKLRACGNWRVPLTPCSHSLALLLTTTCSRRPLPWTR

SEQ ID NO: 323 - protein, 49 aa, Homo sapiens
KTGSVRKANRMPKDVNIQVRKKQKHETRRKSKYNEDFERAWREDLTIKR

SEQ ID NO: 324 - skipped

SEQ ID NO: 325 - protein, 49 aa, Homo sapiens
LQIKERKISKLQVSSGQICKSEKCGCCCQSQGGCSTGRGEGIWGGGSLP

SEQ ID NO: 326 - protein, 49 aa, Homo sapiens
NPLGSMSPQGQVCPALCHLFSHGGICPCAAGLGTHQRAGGRRAASREGV

SEQ ID NO: 327 - protein, 49 aa, Homo sapiens
NYAKRCGNLKKHFINKMEGMPRKRIVFQCLRSTESTRKLKPSLGFLKFL

SEQ ID NO: 328 - protein, 48 aa, Homo sapiens
CFIRAKLHIIRQDLLSSSAPHDASPDILHLPACHLLPRKPAQTARKTF

SEQ ID NO: 329 - protein, 48 aa, Homo sapiens
FSMLTTILVSQLRGLLLMLDCYVILCVRSVWIPDLYSIDHCLCLVLYL

SEQ ID NO: 330 - protein, 48 aa, Homo sapiens
FSRRGKLLIRGKDLLNFSAPYHASLNTFHLPVHQFLLRELVQTAQKTF

SEQ ID NO: 331 - skipped

SEQ ID NO: 332 - protein, 48 aa, Homo sapiens
LLLAIVQAIMSKKFLLKELKILRHQKLSDALPMVPQDQKATIFQIYHF

SEQ ID NO: 333 - protein, 48 aa, Homo sapiens
LMELNLLHQKRLKKRKNFSHKVSQTGLNEILTSLLKLMRNMEEMTLIT

SEQ ID NO: 334 - protein, 48 aa, Homo sapiens
RVMLLADGSAGWGDGLEAAASRGLHAEAPHGRRPSSDSIVCVRRRAKY

SEQ ID NO: 335 - protein, 48 aa, Homo sapiens
SILGKSPMNVTDVEKPSFRSQTFIAIRKLIAERGPIDVVNVEKPSSGN

SEQ ID NO: 336 - skipped

SEQ ID NO: 337 - protein, 48 aa, Homo sapiens
TTPRGLAICRTKSSISRSLFLGLPPVLARKSRARSRFQTNRKVCFILK

SEQ ID NO: 338 - protein, 47 aa, Homo sapiens
ALRNMNTVMKLLRKMRALWACPLSYKPIMLWKKWKNLFVRYGKVGGE

SEQ ID NO: 339 - protein, 47 aa, Homo sapiens
KICCFNSNWMMLATKLTIKKKQYLIFKPDVMLEYKTFKLSAESTVFY

SEQ ID NO: 340 - protein, 47 aa, Homo sapiens
KKMTQQYPLSLKSQVKTIIRIQNCLKKLQLNLQKVILLNYPHLTVRS

SEQ ID NO: 341 - protein, 47 aa, Homo sapiens
LLQKDRFREEVKSPVKWSKFQSLKGSLIPSRLYMMKGLSTSSPQLKN

SEQ ID NO: 342 - skipped

SEQ ID NO: 343 - protein, 47 aa, Homo sapiens
QRKKRKKRARNRNMKKTMSHLIAHQALKMSGLRLFHPRLLTRKKPGK

SEQ ID NO: 344 - protein, 47 aa, Homo sapiens
VKTEKEMEKMEKRKEKMKKRKKTEKKQEMEKRMKMEKRREIKKRGKM

SEQ ID NO: 345 - protein, 47 aa, Homo sapiens
YGLAMAKPNLVPKLSWQTSNSPTGFSVQNLSVENGGSLPRKSSLLHR

SEQ ID NO: 346 - protein, 47 aa, Homo sapiens
YREHRREWEIQLVNESNSVMTEYARVTFSTVVLMMSFLELEWILENV

SEQ ID NO: 347 - skipped

SEQ ID NO: 348 - protein, 46 aa, Homo sapiens
EEAMETHLIPDMMMEEGHQETLPEEWVESIICVALVPLQWLVDEEG

SEQ ID NO: 349 - protein, 46 aa, Homo sapiens
GDPPLPNICCSAPGPTGTQETGHTDAKTAESGDPLGSREPNTSQTE

SEQ ID NO: 350 - protein, 46 aa, Homo sapiens
HLYQPSIKLFKIQIMSSWSLSAISCLSSIVAQRFDLRGSHCSSCQN

SEQ ID NO: 351 - protein, 46 aa, Homo sapiens
HWNSAYLGRTLLVTCILYHRWIVTSMCQSQRWLTSTTSRSSALMWT

SEQ ID NO: 352 - protein, 46 aa, Homo sapiens
KQPTRKPYHCWHKINQEWISEWGPVGYERRGICGESLYSGENKVIA

SEQ ID NO: 353 - protein, 46 aa, Homo sapiens
KSLVKKPNYWYLQSLFLSLCLPNTTSEQCLIDGWVLRQYVLSTFNI

SEQ ID NO: 354 - protein, 46 aa, Homo sapiens
LAGVRGLPKGGLPFSGPGSRIPTFRRAGHEEAWGTLPWTMTMLFWS

SEQ ID NO: 355 - skipped

SEQ ID NO: 356 - protein, 46 aa, Homo sapiens
SNSTEKLGRKLEVQKIYQTQKNPLKNWSQHLAKLNKKKSKERSDEK

SEQ ID NO: 357 - protein, 46 aa, Homo sapiens
TEPCLSHGSQHSGHQEFKTSVLLGTSIVDQKQSIEEVEDTPKPTLV

SEQ ID NO: 358-359 - skipped (2 entries)

SEQ ID NO: 360 - protein, 46 aa, Homo sapiens
WSCDYGRAEARLFPLSRGSCGSVLPEKHVGPAGRPPLCSGKGAHQD

SEQ ID NO: 361 - protein, 45 aa, Homo sapiens
AFLVLKREFTTLNQLRMPPMPPFYYVTREGSCGFVRRPTVVQGMN

SEQ ID NO: 362 - protein, 45 aa, Homo sapiens
EKSYVSIIIWRKPKNQKLAAKWKQRIVTLKMLGNIYWNQFQKSSI

SEQ ID NO: 363 - protein, 45 aa, Homo sapiens
ELKQLHHPPCSLPQKAMIIPRTVSLVLTMQKTWILQRTCLVCLKV

SEQ ID NO: 364 - protein, 45 aa, Homo sapiens
FRRNMMKGKRMPKSAVSWRSSSSRASFLRASLQGRDSVAEQMAMC

SEQ ID NO: 365 - protein, 45 aa, Homo sapiens
KPTSCTCCPLDKFSRRQKGESWRYCVICHLSGWIKPHCKSEGLCA

SEQ ID NO: 366 - skipped

SEQ ID NO: 367 - protein, 45 aa, Homo sapiens
RKKYQQRYNLQERFALKNLKCREKSISATMGSGQLYRRKSSSHKD

SEQ ID NO: 368 - protein, 45 aa, Homo sapiens
RVQIRTFFLPTHPALSFSWEPTLRTPRIQDISSAWHKYRGSKTEY

SEQ ID NO: 369 - protein, 45 aa, Homo sapiens
STPRSWHIQKGCMENGCSQRYDQSFLVVIFCKIQPWRSLWQTELL

SEQ ID NO: 370 - skipped

SEQ ID NO: 371 - protein, 44 aa, Homo sapiens
DEEMKNFPLKNPLVAITTRPKSLPSFLTMHLPLALRKSTYPLSS

SEQ ID NO: 372 - protein, 44 aa, Homo sapiens
ENSMQVPSSQMTASSGSVFKKIAIIPMPQQYIELKKQGGSGMWP

SEQ ID NO: 373 - protein, 44 aa, Homo sapiens
FMYVSTVRNSLTILDILKNIFENIQVKNLLNVQIVMNDLLEIAL

SEQ ID NO: 374 - protein, 44 aa, Homo sapiens
GLVEAYQSARIRKKHLILLFRVLTMHHLLNLPAPFAVKWCLDMT

SEQ ID NO: 375 - protein, 44 aa, Homo sapiens
KPTPTTGDPDTDLVREAPISKQKKSYGSTFKKNLWIHPDCPKNN

SEQ ID NO: 376 - protein, 44 aa, Homo sapiens
LLKRNMKSSWMFAKIFNQFSVTSAWKNSWIQLFGLRSDWLIRAV

SEQ ID NO: 377 - protein, 44 aa, Homo sapiens
LVCFTDSRSDYSNYCWKHTRHHGSVPREKAAECHQLFPDVTCHS

SEQ ID NO: 378 - protein, 44 aa, Homo sapiens
NGGEENTWNLRLIFRDWEDPDGGRGEQLLLECQFPSNNSVSGTC

SEQ ID NO: 379 - protein, 44 aa, Homo sapiens
NLFLPYKGREGRENAPSPRMSEQSSPFTGHKHISNPRWQSPCSR

SEQ ID NO: 380 - protein, 44 aa, Homo sapiens
QHSTCLPLEHFPLHLGILQSLKPVSLEILLFILEKQHTVGQQLL

SEQ ID NO: 381 - protein, 44 aa, Homo sapiens
RFTPQIVMRFHILLIVLLLRMKNQQQILCWTCGLVKLLFLVLPV

SEQ ID NO: 382 - protein, 44 aa, Homo sapiens
RKRSLNYSVRQKMSLSRTPSQQIIQMAVYKAKIIGEHHKTFTTN

SEQ ID NO: 383 - protein, 44 aa, Homo sapiens
RPGHRKYLTLEHSTHLCQPCDDSARAIAHPKRSPILRTSGSCFS

SEQ ID NO: 384 - protein, 44 aa, Homo sapiens
SPVILKAAVIQIFKREGTMIYLLSVGTANLLRTFLVKEKLLVLT

SEQ ID NO: 385 - skipped

SEQ ID NO: 386 - protein, 44 aa, Homo sapiens
WDPLLDREKLLGSPVGNERVLPHRARKEHVWPGCLRLLPHPSGV

SEQ ID NO: 387 - protein, 43 aa, Homo sapiens
ALTPTLMTPTRWQQNLFSNSTTRPSQWDNSLSLASMKSFLAYW

SEQ ID NO: 388 - protein, 43 aa, Homo sapiens
CRMRWPFRWILKEKLNMMQLLDKDSQKTRSFIANTLTWFQRRL

SEQ ID NO: 389 - protein, 43 aa, Homo sapiens
CSPSCPMRKKVPQETRRCPRLPGVASLRLQRSLLEIRKQRQHL

SEQ ID NO: 390 - protein, 43 aa, Homo sapiens
DFIKIVILVLQRHFQQGKLLKKVDLKSHLGTLRKVSQNLGKRV

SEQ ID NO: 391 - protein, 43 aa, Homo sapiens
DRRSYRDLGSLCSGTNSWCQGRSGVHWSSPAWRCLFPRRLHQM

SEQ ID NO: 392 - skipped

SEQ ID NO: 393 - protein, 43 aa, Homo sapiens
ELENKMKKTQEMRKQKIKSILNQIQILKNLRSQDTDIGFCGTN

SEQ ID NO: 394 - protein, 43 aa, Homo sapiens
GKRTILEMTQILKVFIVKNGSMSIKKAQRKGMAIAPWEKPLIG

SEQ ID NO: 395 - protein, 43 aa, Homo sapiens
GQLKMTYCSKNHFRKKNMERWPINKLQQNCWIGKKQEIEGFIS

SEQ ID NO: 396 - protein, 43 aa, Homo sapiens
GSCKSGSRIHERGRGKASSGRWVQHSLINGVRFAEPCLKQSRP

SEQ ID NO: 397 - protein, 43 aa, Homo sapiens
HAPLLPPKVRYPHRCLQIDKGEKGSFAPFHFLTMKINLLHQRK

SEQ ID NO: 398 - protein, 43 aa, Homo sapiens
HLWNDKPPCSREDGVDHPSDCGISLDLRVPHPSHCCARLLERV

SEQ ID NO: 399 - protein, 43 aa, Homo sapiens
KSQKLPTKMILQRSCLLRECIRRRHNLNTFFFVLIHILGQWSH

SEQ ID NO: 400 - protein, 43 aa, Homo sapiens
LCCQYSGCVHSHDRPDPCAGERTRPPSDNRLLRRNVGSETEHQ

SEQ ID NO: 401 - protein, 43 aa, Homo sapiens
LKEERIHMKTFSSHNPKSLMKEKILWDRTVFLQQTMFAIRIKK

SEQ ID NO: 402 - protein, 43 aa, Homo sapiens
LLHQLILHQAPFQELARVLLVVLKRQSETLKLGKRCKRETPMQ

SEQ ID NO: 403 - protein, 43 aa, Homo sapiens
NLCCFKWTCTVSRYKIWCNIHFITWRKSAECKSRGSVHPDKWV

SEQ ID NO: 404 - protein, 43 aa, Homo sapiens
NPAEMRKEWVDGTDLWERVQWHLPALFSLLSQPRSSVSEERAR

SEQ ID NO: 405 - skipped

SEQ ID NO: 406 - protein, 43 aa, Homo sapiens
RHFLEVEGKLNKEIIHRLDSDAEDTVLPQKEDRICKRDQIISI

SEQ ID NO: 407 - protein, 43 aa, Homo sapiens
RSHCLRTRNLKPCWFSKIGQTRALAMNAKRRNNRSILCLGRKV

SEQ ID NO: 408 - protein, 43 aa, Homo sapiens
SIRTSPWDRNGSISSQRQRPRNSKFPQCESPTANQAGEAPHSV

SEQ ID NO: 409 - skipped

SEQ ID NO: 410 - protein, 43 aa, Homo sapiens
TSANIVIAGSTPERMSGDTWWCTLEERTSSVSIVHRDLGERIT

SEQ ID NO: 411 - skipped

SEQ ID NO: 412 - protein, 43 aa, Homo sapiens
YWHKQDSKATRHKWFFRFFHTAQIGRILYLSYPVRAVSRREPV

SEQ ID NO: 413 - skipped

SEQ ID NO: 414 - protein, 42 aa, Homo sapiens
CKSRLHQDPTACRRGVGVGFGAGIRTRGWAGSGPRPGSGAGA

SEQ ID NO: 415 - protein, 42 aa, Homo sapiens
CRVNAVEELHSRRMSVRIVKNWVSCCYVRLSAVGLSTWSALD

SEQ ID NO: 416 - protein, 42 aa, Homo sapiens
EIQLTMNDSKHKLESPALKQVSPASPPTQQPQTPQDSRQVLA

SEQ ID NO: 417 - protein, 42 aa, Homo sapiens
ERKVTLMINLYHLSPHLNQIMKRMCKQKRREGVKSENKQRKK

SEQ ID NO: 418 - protein, 42 aa, Homo sapiens
GKKWLSRNVWKLLVCQTKIIPLRRTQEDTERLPFYMEALLTL

SEQ ID NO: 419 - protein, 42 aa, Homo sapiens
GNIVPAKKNLESVVEAKNVPTNEITVIVRTSQTNMIVEGAKV

SEQ ID NO: 420 - protein, 42 aa, Homo sapiens
HSNVRIVERSLYTGHTVKTNKKTTVEKIHPNVKTVGSATRGA

SEQ ID NO: 421 - protein, 42 aa, Homo sapiens
KFPACGQRCGGARQSGIPSGAVFCLCLPAQGLAIRRGCGPLQ

SEQ ID NO: 422 - protein, 42 aa, Homo sapiens
KRRRRKRKNNPRKPKNKRKEQRRKIRKKTKNGKCHQVFFFLQ

SEQ ID NO: 423 - skipped

SEQ ID NO: 424 - protein, 42 aa, Homo sapiens
NQVLHLISGMQSALVMLEIMKASRLKLQMHISSRSILRKQLN

SEQ ID NO: 425 - skipped

SEQ ID NO: 426 - protein, 42 aa, Homo sapiens
PMNVSSVGKHSVFPVLFVDMKESTLQKNPMNVSSVGKHYLIL

SEQ ID NO: 427 - skipped

SEQ ID NO: 428 - protein, 42 aa, Homo sapiens
RKRRRRRRKTTVGKTALSQCLPIAPCSSCPRPTPFAACAITS

SEQ ID NO: 429 - protein, 42 aa, Homo sapiens
RRRKWKWMRQRKRRKKRRKKNLSQTSSYWITQPELCLPSLRS

SEQ ID NO: 430 - protein, 42 aa, Homo sapiens
SETQKYLKRMTKVSTTPMKSQSQTSLWIKRLTQRRLIVSKPP

SEQ ID NO: 431 - protein, 42 aa, Homo sapiens
SLIKGEGQCLSVKLVETGIGNWKILKIIRNFTVLSYMDQKQR

SEQ ID NO: 432 - protein, 42 aa, Homo sapiens
TPPAFPESPAAVPPTTTGGPQTQLCIYTASHHSHSTGAQQAH

SEQ ID NO: 433 - protein, 42 aa, Homo sapiens
YQQRYNLQERFALKNLKCREKSISATMGSGQLYRRKSSSHKD

SEQ ID NO: 434 - protein, 41 aa, Homo sapiens
GEEDKAAEKGGGRWGAKASGTEVISNSASDLGPGGCGACVL

SEQ ID NO: 435 - protein, 41 aa, Homo sapiens
GYRNLRKAIEKKEVWLVKRIIQTLTKRRKKKRVFRKEKTMN

SEQ ID NO: 436 - protein, 41 aa, Homo sapiens
KGDLKHQNTGMTIGGILESHLQRKNLKCLNINKILNLTHLG

SEQ ID NO: 437 - protein, 41 aa, Homo sapiens
KQGALPCRSHHQLPGPLYLPGGPPGGLCPLSAAQARLHPLG

SEQ ID NO: 438 - protein, 41 aa, Homo sapiens
LRQVLGCGPPHIWGLRGGIKSSEPRDQRGGAVGGSWRTSKS

SEQ ID NO: 439 - protein, 41 aa, Homo sapiens
LTWNWSPLEIWSSWQRQLELTLEFRSSCHCSLCLLMLFLMI

SEQ ID NO: 440 - skipped

SEQ ID NO: 441 - protein, 41 aa, Homo sapiens
MTSKSIRAEPRGEGKVGHSKVSQTGKVSREKRKRKGSCFLF

SEQ ID NO: 442 - protein, 41 aa, Homo sapiens
NACFPEVDSGSPSRRSKRRFQWWDPGSGKVADLAVPKALCS

SEQ ID NO: 443 - protein, 41 aa, Homo sapiens
NEATQELPADKWIQACPYGPELYQTHPITRSNGGQVGRKCT

SEQ ID NO: 444 - protein, 41 aa, Homo sapiens
NKPGRSGSCGTCTHRKKQTDIGSKREDSCSSEKKNSKQRKD

SEQ ID NO: 445 - protein, 41 aa, Homo sapiens
NLSSSWFKTMRADTAFSTTRPIVRMSRSPRCWSSFARLSLW

SEQ ID NO: 446 - protein, 41 aa, Homo sapiens
NNVSCYSGYTDTVLPCEGFKHQLEGEIQWKENHHHIRLFGI

SEQ ID NO: 447 - protein, 41 aa, Homo sapiens
NPGTKFLYLPWPGLHSRILGLPAFQSAHYHCCWGTPSNSQD

SEQ ID NO: 448 - skipped

SEQ ID NO: 449 - protein, 41 aa, Homo sapiens
RKVIRALIQNTVIEVQKAHQGQGADLLGVDLIPDHIQDHVV

SEQ ID NO: 450 - protein, 41 aa, Homo sapiens
RSIKWHCTISIQVFLRQWKCYHPKLEFGGWNALLASIYMLG

SEQ ID NO: 451 - skipped

SEQ ID NO: 452 - protein, 41 aa, Homo sapiens
SSSPSTRSTSTTPELPSASPNSSSRWTESCCEQENQHAHIY

SEQ ID NO: 453 - protein, 41 aa, Homo sapiens
VCKSRSLFGATKTGPSPALIGARPLGIPVEGPTEGCPSQAP

SEQ ID NO: 454 - protein, 41 aa, Homo sapiens
VLLLWIRGTEISLCGWRSTGPLWKKPWGFLQIPTNRVKVSS

SEQ ID NO: 455 - protein, 41 aa, Homo sapiens
WTAAFTRSIQWWPSPAPSHTYQFVVLTTSPMGMNVTCVPRA

SEQ ID NO: 456 - protein, 40 aa, Homo sapiens
ARAKALAWTTRIQTRASTMTWKLRGTHHTQRPICAKYFLI

SEQ ID NO: 457 - protein, 40 aa, Homo sapiens
FTNVRSVGKHVVLIQRLWTIREFTLERSLMNVMSVEKLSS

SEQ ID NO: 458 - protein, 40 aa, Homo sapiens
GGTGTDMTTQKLMMVPNQCKLELELSLRNYALESSQVPMK

SEQ ID NO: 459 - skipped

SEQ ID NO: 460 - protein, 40 aa, Homo sapiens
HGGLFYQTEMGKHTRELLPGNPQHLPICLLGQKSLGKVCE

SEQ ID NO: 461 - protein, 40 aa, Homo sapiens
IRLKGQAQLSMVKSSVPVYQRMATIQKSSQMEWKNTKPLV

SEQ ID NO: 462 - protein, 40 aa, Homo sapiens
IWPGSEDCRREAFLSVDPGQEYPHSEGLGTRRHGGRYLGL

SEQ ID NO: 463 - protein, 40 aa, Homo sapiens
LKKGEKRKEKRKNREKLRRKLRGEKLEKKCWIIKENKKKN

SEQ ID NO: 464 - protein, 40 aa, Homo sapiens
LLRTGQFRGFGLILLHQESHSHRRASSPCRKELLSPSPRP

SEQ ID NO: 465 - protein, 40 aa, Homo sapiens
LMSALSATRLSPPNRTTSSTCSYTQVRSPTNAASVGAPSP

SEQ ID NO: 466 - protein, 40 aa, Homo sapiens
MREFILGRNRTDVMNVVRTSLEIQTWQIITESILERNRTD

SEQ ID NO: 467 - protein, 40 aa, Homo sapiens
NDGQRHEAPPQELIFSYLIFNTNGCKTGICYGRGTTKAES

SEQ ID NO: 468 - protein, 40 aa, Homo sapiens
RESSEGIGQPSIAASCRLWSVSLSGHTILMLLCEKTLPAG

SEQ ID NO: 469 - protein, 40 aa, Homo sapiens
SRIYPRCLRMPWSCLRCMPGNRGAEKTTLTLLKASEPYWS

SEQ ID NO: 470 - protein, 40 aa, Homo sapiens
TTTTSLKEEEGIILITESRSLALLFQSLMILICAGTKEPF

SEQ ID NO: 471 - skipped

SEQ ID NO: 472 - protein, 40 aa, Homo sapiens
WCLARALKRICLQRIKKKTFLWRKVIILRIPRHFIQWKKN

SEQ ID NO: 473 - protein, 40 aa, Homo sapiens
YVQDQQKQIMKDHIIYVKMLLLRRNVDIQATARLLIAKRR

SEQ ID NO: 474 - protein, 39 aa, Homo sapiens
AFFANQEISIVKTIVVCLKVGCVILKMTVVMAAMKKIAQ

SEQ ID NO: 475 - protein, 39 aa, Homo sapiens
DRKRKALKKNVKNPKVILIFLMKKQPSKVRRKEAHGLPL

SEQ ID NO: 476 - protein, 39 aa, Homo sapiens
DTEIFFHFNIMDIVAQMREQRSGMVQTKEQYHFCYDIVL

SEQ ID NO: 477 - protein, 39 aa, Homo sapiens
EDGCVGKALWKWGSGGLAERSPVCFWAELGTPIDGDASQ

SEQ ID NO: 478 - protein, 39 aa, Homo sapiens
FWRRRKIMRNCSSHPNLGRRSDLSLSRHGRRRRTSFPRR

SEQ ID NO: 479 - protein, 39 aa, Homo sapiens
IQGMLKRTPKRNSNMKKIPKKPLKQVSIVKRKKFLLQRS

SEQ ID NO: 480 - protein, 39 aa, Homo sapiens
LFASQMPMYQEAIKVVYKNSARFRSDVWREHLCLTADPV

SEQ ID NO: 481 - protein, 39 aa, Homo sapiens
LPYLPAKISSPHQKQRLKKAYFQMRRTLRICFLLKVRVS

SEQ ID NO: 482 - protein, 39 aa, Homo sapiens
LPYLTAKISSPHQKQRLKKAYFQMRRTLRICFLLKVRVT

SEQ ID NO: 483 - protein, 39 aa, Homo sapiens
MQVLSKTHMNLFPQVLLQMFLRGLKRLLQDLEKSKKRKL

SEQ ID NO: 484 - protein, 39 aa, Homo sapiens
NGSRAAVPVCGRPAERQCFPHKSAQHGDPGEAGAEQSRV

SEQ ID NO: 485 - protein, 39 aa, Homo sapiens
NYPRVCVSLPVSCDVCHICKISSKSCCWWYIFRPNCALG

SEQ ID NO: 486 - protein, 39 aa, Homo sapiens
QKLVDMKVHWKTFQGLVCLILGIYLCPKNKLLKTFIRWT

SEQ ID NO: 487 - protein, 39 aa, Homo sapiens
QPMLGKKKVYLKSHCWKYCRTDTKGKNRLWLLSKSFTSY

SEQ ID NO: 488 - protein, 39 aa, Homo sapiens
RRLHPQQLCGQTQHLRNRRVVFQGYNQEGRRKAAFGTRK

SEQ ID NO: 489 - protein, 39 aa, Homo sapiens
SACTAQSLSHYTLTSAETVLTLYLPRSGTMQLFSTFRTF

SEQ ID NO: 490 - protein, 39 aa, Homo sapiens
SLRGSLRRSRKPEINMASMITAQQSPVCCTSWTASPPPK

SEQ ID NO: 491 - protein, 39 aa, Homo sapiens
SNWTDLILLPAPKTVRSLPVFLLGLAQGPAQTYKQDWEN

SEQ ID NO: 492 - protein, 39 aa, Homo sapiens
TPETISDQQPEISQARNERGHCECAAECPGENQGQDAKR

SEQ ID NO: 493 - protein, 39 aa, Homo sapiens
TPPAFPESPAAVPPTTTGGPQTQLCIYTASHHSHSTGIT

SEQ ID NO: 494 - protein, 39 aa, Homo sapiens
VRNTEMDTEWHLHVHFVNFEHLKKKILNCIWKVLHIRKH

SEQ ID NO: 495 - protein, 38 aa, Homo sapiens
ADTFFFPDELQIVICFPVLIQEIWKGDFKASITGTERM

SEQ ID NO: 496 - protein, 38 aa, Homo sapiens
AMMYPPRKKNVSTGKRKRNLLKKGQKRKCFGMSLFLDF

SEQ ID NO: 497 - protein, 38 aa, Homo sapiens
DSDLLCCLPRDWTPVVWKLGYHELVEQYLAQRGFCILF

SEQ ID NO: 498 - protein, 38 aa, Homo sapiens
EAMFSSRLRGLIPPKNGFWNWNLTWPRKTTFFWNRRNI

SEQ ID NO: 499 - skipped

SEQ ID NO: 500 - protein, 38 aa, Homo sapiens
ELLLREVGRSRPRRLTSSMRNMRAWSKKTPCCGERSGS

SEQ ID NO: 501 - protein, 38 aa, Homo sapiens
EPWRYHLPKKQFLFYIMFENLFRDSQTVGNVNLKPTSA

SEQ ID NO: 502 - protein, 38 aa, Homo sapiens
GGRMLLEMMKRLVRKNLKKTMMILKTSLKMSFQKMRKR

SEQ ID NO: 503 - protein, 38 aa, Homo sapiens
IYDFQRKEKISIKNAEKVEESRRETRARASRGRSFREY

SEQ ID NO: 504 - protein, 38 aa, Homo sapiens
KKGKKIKEGKKKGKKRRGRRSKPTMPQAQRRADGSGRA

SEQ ID NO: 505 - protein, 38 aa, Homo sapiens
KPLMPIKSRQKKKKKKKQDQSTKRLRNPFSVFLKIMRK

SEQ ID NO: 506 - protein, 38 aa, Homo sapiens
NKMDEHESRFWPPLLSRLGQPLCHARPREGRPVPVCGL

SEQ ID NO: 507 - protein, 38 aa, Homo sapiens
NLPYCQLSTTGNDLTDEKASRFFTFPIITNRGNKRRNN

SEQ ID NO: 508 - protein, 38 aa, Homo sapiens
NPQWGEASRVQGLWEGLQDQEPSLYASAYPHRGEALQM

SEQ ID NO: 509 - skipped

SEQ ID NO: 510 - protein, 38 aa, Homo sapiens
NWSGGRGISSHSPRRSSGSVLCFSGTYPGDVRHGFRSS

SEQ ID NO: 511 - protein, 38 aa, Homo sapiens
TDASATYPSAQPLWATHGKASGRATTAGVQMKTPRPRD

SEQ ID NO: 512 - protein, 38 aa, Homo sapiens
THTRWGITTWDSWSVRMKANWIQAQQNKSLILSPSFTK

SEQ ID NO: 513 - protein, 38 aa, Homo sapiens
TKKKKKRRRKQKRPQPKILSHRPRRKRRKRRRQQSRLY

SEQ ID NO: 514-515 - skipped (2 entries)

SEQ ID NO: 516 - protein, 38 aa, Homo sapiens
WRLHAHEVSAAPVQARVVLELWLRVEPRLHGGPLVRRV

SEQ ID NO: 517 - protein, 37 aa, Homo sapiens
ACKSPSTQELSKASKFCSTRTSSNACKSSTYSEYRSN

SEQ ID NO: 518 - protein, 37 aa, Homo sapiens
AGNFAIMEIQCPALRKTLPILFGSLRRQNMSLEMWCR

SEQ ID NO: 519 - protein, 37 aa, Homo sapiens
DLNFFRVGRLLLRSVFHNRKTTVTVESLCSSTASASP

SEQ ID NO: 520 - protein, 37 aa, Homo sapiens
DRLIHLRRMMMKKIMIMIKEVLVAKQLLMLAIRRMKK

SEQ ID NO: 521 - protein, 37 aa, Homo sapiens
EERRSPRNISMKLGIVGHLYYLGGSVLALSLKHLTKK

SEQ ID NO: 522 - protein, 37 aa, Homo sapiens
GVVHHSPAGRHHASLSGRQSQAAELRVEQCHTTKEVY

SEQ ID NO: 523 - protein, 37 aa, Homo sapiens
IRTAPDGMEMKWPKEQRLISKPLSLSSRRQHLPMESS

SEQ ID NO: 524 - protein, 37 aa, Homo sapiens
KKLMSLFVKDFVMMSRVMSVGMYMDSCSVLIKNMMKL

SEQ ID NO: 525 - protein, 37 aa, Homo sapiens
LKNPDKRLTSGLNVNPKVKSRNSSARTLLMLRLCWYW

SEQ ID NO: 526 - protein, 37 aa, Homo sapiens
LWRNIKTNVSSSLSIRAILKKIHLQQRLLNAGKNTMR

SEQ ID NO: 527 - protein, 37 aa, Homo sapiens
NLGRIHLLNSGGVHSPLLKCVVKFRSQKILLQSRLKA

SEQ ID NO: 528 - protein, 37 aa, Homo sapiens
NLGRIHLLNSGSVHSPFLRCMVKFWSQKIVLQNRLKA

SEQ ID NO: 529 - protein, 37 aa, Homo sapiens
SKMINQPRKSMCQKRGTLKRNETRLKRKARNLLGRKK

SEQ ID NO: 530 - protein, 37 aa, Homo sapiens
SYQISEQGKKEKVDNYCCVSGSGCHNRSNYWLVSWQM

SEQ ID NO: 531 - protein, 37 aa, Homo sapiens
TGGVIHFQPVMHYVEEMLEGLVEQSYHLVTRNFIQIL

SEQ ID NO: 532 - protein, 36 aa, Homo sapiens
DLRLRIMYTCGRCITQIWDGCALMPLIQRRETGCDM

SEQ ID NO: 533 - protein, 36 aa, Homo sapiens
GMAPDEGGKARTTEPETVAGRRDVEGRAKTGNSKAG

SEQ ID NO: 534 - protein, 36 aa, Homo sapiens
GNRAADAADRKPEGDRSSQGPAHQSAGKALRAPRNL

SEQ ID NO: 535 - protein, 36 aa, Homo sapiens
GSPTPPQLLFGKMPCHWEPFPSILGISLISCKLNKS

SEQ ID NO: 536 - protein, 36 aa, Homo sapiens
HLSSCTCLRVHLSGHSGHHQKSMTSWPKKAGLLEQT

SEQ ID NO: 537 - protein, 36 aa, Homo sapiens
ICLQRKKAVLCWKRQKTKSFGNCFRRGKKESLKRMP

SEQ ID NO: 538 - protein, 36 aa, Homo sapiens
KYHGTVTRKSLQFLTACYFGTRAGDSDCVIWQIGRS

SEQ ID NO: 539 - protein, 36 aa, Homo sapiens
LIGFLKIKRSKLLVAKMFLCFSSELWGKFYIVKEHL

SEQ ID NO: 540 - protein, 36 aa, Homo sapiens
LMKLLSRNKNIKKPTIAMLRTPAKKRVKGKMRTFYL

SEQ ID NO: 541 - protein, 36 aa, Homo sapiens
LPNQAKSGLWPITELKIQMRGILGEMSRLPILPRVP

SEQ ID NO: 542 - protein, 36 aa, Homo sapiens
LPRVQLRPKPLSPRRPSLSRGSRRLQRQRRQLRRKS

SEQ ID NO: 543 - protein, 36 aa, Homo sapiens
LSRNILEMSFCLFMTKTSNMDLTFILLQLKRAKKTI

SEQ ID NO: 544 - protein, 36 aa, Homo sapiens
LTTLMNVVKLLTHSQSLLNIKEFILERAHKDVIKNV

SEQ ID NO: 545 - protein, 36 aa, Homo sapiens
NCFRYQQRADRLSTRRNAVLEGGLPAVVQLETKISP

SEQ ID NO: 546 - protein, 36 aa, Homo sapiens
NDIPTSVIQRLHHQRESQIVTLGSPLPCIYPIFFQI

SEQ ID NO: 547 - protein, 36 aa, Homo sapiens
NLLNRLESLGKKGRILFSIQSTLYENFPLCKRLPYK

SEQ ID NO: 548 - protein, 36 aa, Homo sapiens
NLLRYKRKITEKKRKEPQRSCSVQSQILLLLLWLIG

SEQ ID NO: 549 - protein, 36 aa, Homo sapiens
NRHMYTTNKRSTRARRKGRESSPGKTNGPGRGKKAK

SEQ ID NO: 550 - protein, 36 aa, Homo sapiens
PPSLTSMQDHALLPQFLTINMATLHPGCSPEEPALS

SEQ ID NO: 551 - protein, 36 aa, Homo sapiens
PSKEWTMRINSRKHSLPRCHPSPPLLLPRLITRGCP

SEQ ID NO: 552 - protein, 36 aa, Homo sapiens
QELQESEKPEVVVMIAGILGAMIEVPVVHVELWVVE

SEQ ID NO: 553 - protein, 36 aa, Homo sapiens
QGSSQRDCCGPVPEVLPQAHGHSLLLLRNCRYWGQW

SEQ ID NO: 554 - protein, 36 aa, Homo sapiens
QKIATSCFRHQKLPEDRLFFVCHRKKMCHPRTWPKL

SEQ ID NO: 555 - protein, 36 aa, Homo sapiens
QLLFMTLNYRLQRPYRKLLMTWALMLLSIILTLSLF

SEQ ID NO: 556 - protein, 36 aa, Homo sapiens
RAYKVCTIRYVALKLKLRDKRKCFEIMNPKSFIYSE

SEQ ID NO: 557 - protein, 36 aa, Homo sapiens
RKQRRIKTCFRWFLAACKTHSFLYGPYLQSREKKTN

SEQ ID NO: 558-560 - skipped (3 entries)

SEQ ID NO: 561 - protein, 36 aa, Homo sapiens
SYQISEQGKKEIDVHYYLCNCFACDPWNYPSNNIVL

SEQ ID NO: 562 - protein, 36 aa, Homo sapiens
VTMAMPSSQTALPPLHHLLLKHLLLTAQEGICHHHH

SEQ ID NO: 563 - protein, 35 aa, Homo sapiens
ASQEGQPHLDTESKRSSKGWIRFLKRKMTQLVTPR

SEQ ID NO: 564 - protein, 35 aa, Homo sapiens
CRKWFLLFRLQWTGTFGIKVQSSHHLIFLKGKQKL

SEQ ID NO: 565 - protein, 35 aa, Homo sapiens
DASRILSPYCIRKTGYAKTLFYVAASKTHKALRIQ

SEQ ID NO: 566 - skipped

SEQ ID NO: 567 - protein, 35 aa, Homo sapiens
DLISSNSRIISIQYLDLETSKKLSKKLKDSLKALN

SEQ ID NO: 568 - protein, 35 aa, Homo sapiens
FCQGKRKLNKRKKKLHSNFKKNCDGEEHSYMLMST

SEQ ID NO: 569 - protein, 35 aa, Homo sapiens
FLILLNKAPVQGHHQIHSKFPVLTSQPQRLYQKTQ

SEQ ID NO: 570 - protein, 35 aa, Homo sapiens
GAEESGPFNRQVQLKVHASGMGRHLWNCPAFWSEV

SEQ ID NO: 571 - protein, 35 aa, Homo sapiens
GELSSEVEDDEKMTGSQDLILQQLNQRLQHQSLTY

SEQ ID NO: 572 - protein, 35 aa, Homo sapiens
GRETIIKTLTQRKKLPWKLKLKLPEKGPLSLWRLE

SEQ ID NO: 573 - protein, 35 aa, Homo sapiens
GSHSLRLPPPPPPPPLPCRHPSRLHCQGLTKRTVF

SEQ ID NO: 574 - protein, 35 aa, Homo sapiens
HDSREDCRVPTYHPHICSYWRRNRRIKELYKKVTG

SEQ ID NO: 575 - protein, 35 aa, Homo sapiens
IGMWIKSIGEYGSVHMYLQYALLPMWDCCLVLFVP

SEQ ID NO: 576 - protein, 35 aa, Homo sapiens
IITWALQGAVHIVCPHHCGHSVLWTLYFYLCLAIQ

SEQ ID NO: 577 - protein, 35 aa, Homo sapiens
KKGMKNQPSLMGQGSQMHFPSSKQKIVITCFPRWT

SEQ ID NO: 578 - protein, 35 aa, Homo sapiens
LKEKRNRIANLRISTLSEGAPGRAKPSCSLKKGKE

SEQ ID NO: 579 - protein, 35 aa, Homo sapiens
LKSHFSSRYPSVYPVLIFRLQKGHCTSGITNIFLV

SEQ ID NO: 580 - protein, 35 aa, Homo sapiens
LSKCGTVRTGTLWLFSPCHSPVIAWKPILQRMAHS

SEQ ID NO: 581 - protein, 35 aa, Homo sapiens
NHLGPGGLSAGVAEGWGGPLQAAGAPAPRDHRENV

SEQ ID NO: 582 - protein, 35 aa, Homo sapiens
NITMLKLKTKFGSWQTLCKRSNVWQDKCFFKPFLT

SEQ ID NO: 583 - protein, 35 aa, Homo sapiens
NNSFLGYPFCQPASQGPETNTDGFFPTSQDGCNLN

SEQ ID NO: 584 - protein, 35 aa, Homo sapiens
NYKATSSKASNTCTDSSRLCYNNRKFPKPEDTVYI

SEQ ID NO: 585 - protein, 35 aa, Homo sapiens
PGSRCPGSEGKHAEPGWRSHRVLPRHHLSSFPIQS

SEQ ID NO: 586 - protein, 35 aa, Homo sapiens
PLIPDLPIDCCPYKQGQGHPPIPRDHSRDQSISLL

SEQ ID NO: 587 - protein, 35 aa, Homo sapiens
PSKEWTMRINRKHSLPRCHPSPPLLLPRLITRGCP

SEQ ID NO: 588 - protein, 35 aa, Homo sapiens
QILQIIKKWIFLLETVNVKRKLISVCIILMMKLMK

SEQ ID NO: 589 - protein, 35 aa, Homo sapiens
QRLQTFILILDYSVGIIAMLACLFYPNLNPKCSLV

SEQ ID NO: 590 - protein, 35 aa, Homo sapiens
SIFYMFFPHGGRVHFLWQLHLHVCETLSKRKSVIK

SEQ ID NO: 591 - skipped

SEQ ID NO: 592 - protein, 35 aa, Homo sapiens
SSLWDYPPRKRTLIFNFTIKKEGNLIQNRSPTPSE

SEQ ID NO: 593 - protein, 35 aa, Homo sapiens
TIKVWMSVRCTEEVIMDLTNVCQLPRAKYFYLINV

SEQ ID NO: 594 - protein, 35 aa, Homo sapiens
VKTTTGKNQLTDRQFTKSLCKGHSQSTTTNQKNQG

SEQ ID NO: 595 - protein, 35 aa, Homo sapiens
VPCPNYLLQKNVCQDALGGVLPVIAVDLALAVKNY

SEQ ID NO: 596 - protein, 35 aa, Homo sapiens
VSEKMEFSTLVWIIHVHYSGAFRRKKLFCLHMEIV

SEQ ID NO: 597 - protein, 35 aa, Homo sapiens
WSKTRQQPLGTARRRGRSRRLLLVSAKSWKRRTRL

SEQ ID NO: 598 - protein, 34 aa, Homo sapiens
ALKPINTSIYILRASSLWGAAWWSPRKSLACPMP

SEQ ID NO: 599 - protein, 34 aa, Homo sapiens
DGAMTLKRGRFQNPSPSLMVQTFLGTKEQEYPQN

SEQ ID NO: 600 - protein, 34 aa, Homo sapiens
DYKRAGSYNIGVCEKKYARGRDSLELLPKELEVI

SEQ ID NO: 601 - protein, 34 aa, Homo sapiens
ENKILTHRRLGVLQEVIDQLLRRRVLREMGQGQH

SEQ ID NO: 602 - protein, 34 aa, Homo sapiens
ETWVNFHGQPQRTTKCSERQMRTRTMGPPLRTQR

SEQ ID NO: 603 - protein, 34 aa, Homo sapiens
FEKQLQTFWAVDKGNLRKDEIPQMVLIYPWLQLI

SEQ ID NO: 604 - protein, 34 aa, Homo sapiens
FQKRKGEGEDPTTISVTLQIKIPDAVPLSFSHST

SEQ ID NO: 605 - protein, 34 aa, Homo sapiens
GEVISSLSWTVLSKMSMISISYWKKQKSRLSGRL

SEQ ID NO: 606 - protein, 34 aa, Homo sapiens
GSVKRVWSRNVASRMPLSCQLCSSSTKSSSEPRS

SEQ ID NO: 607 - protein, 34 aa, Homo sapiens
HGGLFYQTEMGKHTRELLPEHSGAGEGKNSTFMQ

SEQ ID NO: 608 - protein, 34 aa, Homo sapiens
HGRILALSFWIIIFMKKILIFPATGRFSLKFLMG

SEQ ID NO: 609 - protein, 34 aa, Homo sapiens
HKRTRPLLSRPPGSQRTWTASNWCPWFRKPSPPS

SEQ ID NO: 610 - protein, 34 aa, Homo sapiens
ICREVFRHFGRSCGPTRTQQLFGHTIRTSERSEK

SEQ ID NO: 611 - protein, 34 aa, Homo sapiens
KDLKTPAKIRKLYLCILYTYTINTAKTQCCSDKR

SEQ ID NO: 612 - protein, 34 aa, Homo sapiens
KRGISSRTDLLPRQSNRQDVYSECQGNGKCCHRS

SEQ ID NO: 613 - protein, 34 aa, Homo sapiens
KTSSHQTGSPLAWGPGSEGNPKEKVGRADYQKVH

SEQ ID NO: 614 - protein, 34 aa, Homo sapiens
LCCCPRNFYRRTKIRYRDGVSSCWPGWSPTLDLK

SEQ ID NO: 615 - protein, 34 aa, Homo sapiens
LSLLFPWASISDPFPLMFLSEGPSMSTKPFSIFF

SEQ ID NO: 616 - protein, 34 aa, Homo sapiens
MVIKGCQKKYWRIASFKLYAFSLKRSPHSCQTLV

SEQ ID NO: 617 - skipped

SEQ ID NO: 618 - protein, 34 aa, Homo sapiens
NGRNYTRVNLVMTMKIPKIFKPSKKPRCIWEISI

SEQ ID NO: 619 - protein, 34 aa, Homo sapiens
NKRSCREKKRMSACSWCLQAGMQQLGICILLLQC

SEQ ID NO: 620 - protein, 34 aa, Homo sapiens
NRGSCTAERISFGFIFSVCHLTSCFKEQTKKHIQ

SEQ ID NO: 621 - protein, 34 aa, Homo sapiens
NRILSGTCSFRQPSRAGGYIDIPLLHSELERLLY

SEQ ID NO: 622 - protein, 34 aa, Homo sapiens
NTGGNGEIRCQQLLNLVPGFRMPVQIFIHLLPRN

SEQ ID NO: 623 - protein, 34 aa, Homo sapiens
NTKISQVWWCIPILPATQGAEVGEWLEPGRQRLQ

SEQ ID NO: 624 - protein, 34 aa, Homo sapiens
PFIKQQTFLRCLCALLMVISTFLQKNQLPLLILI

SEQ ID NO: 625 - protein, 34 aa, Homo sapiens
QRQLLQPESLNLMQSLKQPAQLQVHRNNLRGKSR

SEQ ID NO: 626 - skipped

SEQ ID NO: 627 - protein, 34 aa, Homo sapiens
RGKGGREGSLGPSRGSEKPNKQFPLWNPKNLRSN

SEQ ID NO: 628 - protein, 34 aa, Homo sapiens
RKLQSWRRVEILLQKKSYKSWIRLSSMLPIWVVT

SEQ ID NO: 629 - protein, 34 aa, Homo sapiens
SQRSGTLWLALLLHSVVTTGVIGDIMWAKNISGL

SEQ ID NO: 630 - protein, 34 aa, Homo sapiens
STIRRLQSWLKNTRQNWKALSISRMPFGLKNSKS

SEQ ID NO: 631 - protein, 34 aa, Homo sapiens
TAFRPICKGLFATRQRQNGQEENTRSEENLESCV

SEQ ID NO: 632 - protein, 34 aa, Homo sapiens
TSCFKTKSTQEGRVCQERFCCCRKAKGEGENKSH

SEQ ID NO: 633 - protein, 34 aa, Homo sapiens
TTSTKSREEKGSQARTSASINEGKNKIQSHNFIK

SEQ ID NO: 634 - protein, 34 aa, Homo sapiens
VAANGLKMSSRQHYHQKKSNGMEACGTHPTPRLS

SEQ ID NO: 635 - protein, 34 aa, Homo sapiens
WRRKHGQAELRDARKHAVEVTLDPETAHPKLCVS

SEQ ID NO: 636 - protein, 33 aa, Homo sapiens
AKINVELPWWKIFLKALTIQKMHHFTYHFSKAG

SEQ ID NO: 637 - protein, 33 aa, Homo sapiens
CPLLLVYIMSTTGWLERAYGRLWRPTAIRQTLY

SEQ ID NO: 638 - protein, 33 aa, Homo sapiens
EQLPVSDGPTVWLPRTGVHPKYKQIINTSNFCF

SEQ ID NO: 639 - protein, 33 aa, Homo sapiens
ESPLICFHLQVLLLLNLRILAAQQLRFLVISPY

SEQ ID NO: 640 - protein, 33 aa, Homo sapiens
GLQTKRTLRIRKPRVLKPLQFRLASQILPTLSK

SEQ ID NO: 641 - protein, 33 aa, Homo sapiens
HVVSHLLSSSFLSLAALYLELLFWLYLELTQSI

SEQ ID NO: 642 - skipped

SEQ ID NO: 643 - protein, 33 aa, Homo sapiens
ISGRSRKERKAAGRLQGGGVADARLERDQPCSS

SEQ ID NO: 644 - protein, 33 aa, Homo sapiens
LACQHLMIHLVKLVPTTKCQNQERKVHPARVGL

SEQ ID NO: 645 - protein, 33 aa, Homo sapiens
LFPKKKCTNLSVPMMLTILIWKRVFILLLSDKK

SEQ ID NO: 646-647 - skipped (2 entries)

SEQ ID NO: 648 - protein, 33 aa, Homo sapiens
NQRGGIRGHQTRKTPQKRGKNLICSFSVGQSCR

SEQ ID NO: 649 - protein, 33 aa, Homo sapiens
NTCFPRVIGYKYASSKSYLSILLESVSISTHQL

SEQ ID NO: 650 - protein, 33 aa, Homo sapiens
PALSSLMKLMLLEGLVLMMVLEVTMKCREQCWN

SEQ ID NO: 651 - skipped

SEQ ID NO: 652 - protein, 33 aa, Homo sapiens
PILDKNLMDVLNAVKPSLTGHTLLGTRKEFTPD

SEQ ID NO: 653 - protein, 33 aa, Homo sapiens
QTEVCWKRWDSLKVKLSHRKRTARTVLFARMGL

SEQ ID NO: 654 - protein, 33 aa, Homo sapiens
QTRKRTSGKAARGTERETEEGRTRTKSQKETRS

SEQ ID NO: 655 - skipped

SEQ ID NO: 656 - protein, 33 aa, Homo sapiens
SLKKSSQKSATASCAHTTPTLKSSLQKSISAWP

SEQ ID NO: 657 - protein, 33 aa, Homo sapiens
TCRSRTTQGKKTGKERKTCGTSKVTKERTLSSK

SEQ ID NO: 658 - skipped

SEQ ID NO: 659 - protein, 33 aa, Homo sapiens
TPMTPLRRFLDQGCSTTCSQMNSFEMYLNLDPQ

SEQ ID NO: 660 - protein, 33 aa, Homo sapiens
VNQKKGNITKRKKRREKRKSILLHLIVLNSPES

SEQ ID NO: 661 - skipped

SEQ ID NO: 662 - protein, 32 aa, Homo sapiens
AAAFRGGKEEFISIYGINCPRIIFRFTWAFTE

SEQ ID NO: 663 - protein, 32 aa, Homo sapiens
AAAGVGFYCRRNHNRRLCLNHKWPQFGSCPRK

SEQ ID NO: 664 - protein, 32 aa, Homo sapiens
AERLGLHQDSATHRNGDPEESQRQRLLLISGN

SEQ ID NO: 665 - protein, 32 aa, Homo sapiens
CYSSLSRGSLQNWTRNAEHFKKSCSYFASASK

SEQ ID NO: 666 - protein, 32 aa, Homo sapiens
DPGVCDLYDGLCLWGPNSISAVHAHLSPGLYR

SEQ ID NO: 667 - protein, 32 aa, Homo sapiens
EKEKVKGKKRPEGTERTQGEKRAQGTQDPESP

SEQ ID NO: 668 - protein, 32 aa, Homo sapiens
EKKERKRESRPGGTGRATILFVTQTQDSKGKG

SEQ ID NO: 669 - skipped

SEQ ID NO: 670 - protein, 32 aa, Homo sapiens
FILEVQLKETVVTHLLEYSTLLVISSYPSWLW

SEQ ID NO: 671 - protein, 32 aa, Homo sapiens
GAYALMPAAGGQLWGGARVCGGGGRGGSALRQ

SEQ ID NO: 672 - protein, 32 aa, Homo sapiens
HSLWKSLISNNRSLMKQHCTVLWPLCIPNVNK

SEQ ID NO: 673 - protein, 32 aa, Homo sapiens
IIHKNSLPPPTPKDVENPANLLTLLVAKILAG

SEQ ID NO: 674 - protein, 32 aa, Homo sapiens
IWDGKECSDITGFPGGINWDSFSRKAKSVFGM

SEQ ID NO: 675 - protein, 32 aa, Homo sapiens
IYRKSGTHQMRTAPSVWNASRPPQATRARSLR

SEQ ID NO: 676 - protein, 32 aa, Homo sapiens
KYTKIRLKNKRNLKGKYKLKLHTKKKKKEKKK

SEQ ID NO: 677 - skipped

SEQ ID NO: 678 - protein, 32 aa, Homo sapiens
NCDYALQMCPKSTTGSSVASSQRRIRTFQETA

SEQ ID NO: 679 - skipped

SEQ ID NO: 680 - protein, 32 aa, Homo sapiens
NGFGGYFRTIECNDNRKQEKCENSERRSSKAG

SEQ ID NO: 681 - protein, 32 aa, Homo sapiens
NLQAACTPCSSPENSHWGVTVTTQPSQSPSPI

SEQ ID NO: 682 - protein, 32 aa, Homo sapiens
NMDGTNNNCNFLLYQESGNQENIFIHIARRIL

SEQ ID NO: 683 - skipped

SEQ ID NO: 684 - protein, 32 aa, Homo sapiens
NQAHHLRFGQSKQQQGAGCGPGVRGGQRQNKP

SEQ ID NO: 685 - protein, 32 aa, Homo sapiens
NSFVCYRPENPEHSRGHPTVLFCNLLCGGFES

SEQ ID NO: 686 - protein, 32 aa, Homo sapiens
PRENCRKPWNLNQSAGSKWSRHLSKPPLVTVA

SEQ ID NO: 687 - protein, 32 aa, Homo sapiens
QRKVLLQAGRDQKPSYCPEEPQLFLSEHPLGI

SEQ ID NO: 688 - protein, 32 aa, Homo sapiens
REDILKACKQMQMIIFLITRMEWKKYLVPSIP

SEQ ID NO: 689 - protein, 32 aa, Homo sapiens
RPGSERKKRVPGPRQEDIRGRHTKEKEAQRRV

SEQ ID NO: 690 - protein, 32 aa, Homo sapiens
RRMDSSHLSLIIPSLYGWYQLCVSSMKLLAHS

SEQ ID NO: 691 - protein, 32 aa, Homo sapiens
RWLCRQSSMEVGIRRPGRKESCLLLGRTWHAN

SEQ ID NO: 692 - protein, 32 aa, Homo sapiens
SEITKIMGWKINSVFLSSLSVYMLNCIFVVSS

SEQ ID NO: 693 - protein, 32 aa, Homo sapiens
SGEILFQKRYLFLGGLLQLQITRTSGISLMKG

SEQ ID NO: 694 - protein, 32 aa, Homo sapiens
SKRSLMQPSSLAFNTRTLSNSQRSLKAGLQIK

SEQ ID NO: 695 - protein, 32 aa, Homo sapiens
TKGKELDMNFRKFQLTSHFLEDGVVISLAKPQ

SEQ ID NO: 696 - protein, 32 aa, Homo sapiens
VVKTVALGHLTIRNVASVDPGQTVLWMESLCL

SEQ ID NO: 697 - protein, 32 aa, Homo sapiens
YFILGQISTSRIKGNKYFKSFGIFLFKNVREL

SEQ ID NO: 698 - protein, 31 aa, Homo sapiens
EGEEDQRRKEEGEEKKGKKIKTHHAPGSTAC

SEQ ID NO: 699 - protein, 31 aa, Homo sapiens
EVCLRLMNKCCFMVPAVNLWKQSAFITLIGE

SEQ ID NO: 700 - protein, 31 aa, Homo sapiens
FPPSAQFIMSCIIRFPVIRTARPKTYFQAYF

SEQ ID NO: 701 - protein, 31 aa, Homo sapiens
GTMKTSTNCPMTTSADPRQRRCCSLTQGPRT

SEQ ID NO: 702 - protein, 31 aa, Homo sapiens
HLWISLIFFMNSVNLSSPKARDWTVSELLKN

SEQ ID NO: 703 - protein, 31 aa, Homo sapiens
IETWCQRICKTSNDLQWCVFTMFFNPIYCWM

SEQ ID NO: 704 - skipped

SEQ ID NO: 705 - protein, 31 aa, Homo sapiens
IYVRKRFSPIHELLHHLVLVLESLLGMLPGY

SEQ ID NO: 706 - protein, 31 aa, Homo sapiens
KIQSLQTVVKVKSYQKILLLSLRRTKALKGG

SEQ ID NO: 707 - protein, 31 aa, Homo sapiens
KKCFPQQRLCIQYLNGTRGGAYEICVQSAES

SEQ ID NO: 708 - protein, 31 aa, Homo sapiens
KLVTSFCKKLPCRAISYMRSSLTLASELRPG

SEQ ID NO: 709 - protein, 31 aa, Homo sapiens
KTNKITVTRKTPQVIIWIIPFWFPFKFKKEI

SEQ ID NO: 710-711 - skipped (2 entries)

SEQ ID NO: 712 - protein, 31 aa, Homo sapiens
MTTKRLNKMVSNQKIKLIRPQPKFRLASVDT

SEQ ID NO: 713 - protein, 31 aa, Homo sapiens
NGIKGRGKWARSSQKETTCQRQAREQTRNEL

SEQ ID NO: 714 - protein, 31 aa, Homo sapiens
NKRPAHHRRWSETFWGYCVQVLWYDIYCFQP

SEQ ID NO: 715 - protein, 31 aa, Homo sapiens
NSDNVAGPAEPGAAEAGDYGGGIWARVKGEQ

SEQ ID NO: 716 - protein, 31 aa, Homo sapiens
NVSCLERKRIKPQNFVKHLKSVGKNVYLAEG

SEQ ID NO: 717 - protein, 31 aa, Homo sapiens
PEQLTLPISQQKPSPVLGKLEMVKAVQLRVA

SEQ ID NO: 718 - protein, 31 aa, Homo sapiens
PSGSMHTLLITREFTLGSHCHHPTQSITKSY

SEQ ID NO: 719 - protein, 31 aa, Homo sapiens
QTRKSKTRAGMRTMMKTKKGWKKKNRMKRKK

SEQ ID NO: 720 - protein, 31 aa, Homo sapiens
QVNYQSVKLQAFSNLKIPLLCCFWLLQSSVF

SEQ ID NO: 721 - protein, 31 aa, Homo sapiens
RVKTTFLNCCLQKSLLKFSVSWTFGVCAGLH

SEQ ID NO: 722 - protein, 31 aa, Homo sapiens
SKEKEKLVHLKRNQNLKRAGRLPKGTVWQRQ

SEQ ID NO: 723 - protein, 31 aa, Homo sapiens
SRLPHQSPGHLGLFLLHQVLRKLKQMLNNKL

SEQ ID NO: 724 - protein, 31 aa, Homo sapiens
SSLWDYPPRKRTLIFNFTIKKEGNLIQNRSF

SEQ ID NO: 725 - protein, 31 aa, Homo sapiens
SSRKDGCYWCRSNRCRIGFSLAKTWCRCDSS

SEQ ID NO: 726 - protein, 31 aa, Homo sapiens
TEAKEGEKEAWGPAEEAKNQTSSSHCGTPRT

SEQ ID NO: 727 - protein, 31 aa, Homo sapiens
TTTKKKQLRCWNTWAKMFFMVFLIIWQNTMF

SEQ ID NO: 728 - protein, 31 aa, Homo sapiens
TVFHHIVNQSINFRKNAEKNDKKQQGMAGLV

SEQ ID NO: 729 - protein, 31 aa, Homo sapiens
VNFKKSMNCWRKPGDKVYLLPNGTGQRLWSG

SEQ ID NO: 730 - protein, 31 aa, Homo sapiens
YVWIMKRKAFQLQQFEKLKFSGSLPIRVLSI

SEQ ID NO: 731 - protein, 30 aa, Homo sapiens
CWLFYRRFLFYPQSQYPWFLFLLKDYSTSL

SEQ ID NO: 732 - protein, 30 aa, Homo sapiens
DEQDHGHPKDATGHHLDHPILVPVQVQKRN

SEQ ID NO: 733 - protein, 30 aa, Homo sapiens
EAHCHHAEQALAHGEEADRAQGGPGICGEV

SEQ ID NO: 734 - protein, 30 aa, Homo sapiens
EGSYQILRVTLVALMWNLSQTLRRKEAVMK

SEQ ID NO: 735 - protein, 30 aa, Homo sapiens
EKTPNQALKNQKRKWMLYHSLISTIMQVLL

SEQ ID NO: 736 - protein, 30 aa, Homo sapiens
GLHKSAAFHCPDFPVLPFISAWQFPHSTFP

SEQ ID NO: 737 - skipped

SEQ ID NO: 738 - protein, 30 aa, Homo sapiens
ILVDLMPERVQNMRGVMLFLSETEFTNSTD

SEQ ID NO: 739 - protein, 30 aa, Homo sapiens
IPLSQNSLPHDPQNTQGQKESKGQKEKLSE

SEQ ID NO: 740 - protein, 30 aa, Homo sapiens
IPLSQNSLPRDPQNNQSQKESKGQKEKLSE

SEQ ID NO: 741 - protein, 30 aa, Homo sapiens
IPLSQNSLPRDPQNTQSQKESKGQKEKLSE

SEQ ID NO: 742 - protein, 30 aa, Homo sapiens
IRTAPDGMEMKWPKEQKERATEMGRNPALP

SEQ ID NO: 743 - protein, 30 aa, Homo sapiens
KHFLCGVCGSTFCICFLCRIRVSPTGSNGI

SEQ ID NO: 744 - protein, 30 aa, Homo sapiens
KIKAAAGRSQKTAESLSYKDSFLASSPEND

SEQ ID NO: 745 - protein, 30 aa, Homo sapiens
KKGPEHSSQEEKTRWPLIRRRGRGGCQFRI

SEQ ID NO: 746 - protein, 30 aa, Homo sapiens
KLLLWLVLLFRSLLFHHRRNCRSGCRAHLY

SEQ ID NO: 747 - protein, 30 aa, Homo sapiens
KLSTKYFLPSVIVNKNWRLMSAIKKPKGNS

SEQ ID NO: 748 - protein, 30 aa, Homo sapiens
LEWWSWDFQPLPSQKLGLGFVFQRHIPGRC

SEQ ID NO: 749 - protein, 30 aa, Homo sapiens
LTLERTHMNVRNVGKHLLLSVPCIDIKRLT

SEQ ID NO: 750 - protein, 30 aa, Homo sapiens
LTLERTRMDVRNVGKHLLLSVPCIDIKRLT

SEQ ID NO: 751 - protein, 30 aa, Homo sapiens
MDPFARRLQLKNGRLLIQADRELKELIFQQ

SEQ ID NO: 752 - protein, 30 aa, Homo sapiens
METNNIWHLFLPCNYSGEKEVWPPWLEYLL

SEQ ID NO: 753 - protein, 30 aa, Homo sapiens
MSHLIAHQALKMSGLRLFHPRLLTRKKPGK

SEQ ID NO: 754 - protein, 30 aa, Homo sapiens
NGTTVLQSKIQLASEKHPKAESSFLKMTQC

SEQ ID NO: 755 - protein, 30 aa, Homo sapiens
NLYCLQRPILWMDKGRWCLQPFITQQQTDF

SEQ ID NO: 756 - protein, 30 aa, Homo sapiens
NNYLCWLFSTVFLLHCSCPCGNFYSCCDGL

SEQ ID NO: 757 - protein, 30 aa, Homo sapiens
NRRVSGIFSEAPGIQSRPREGQRNRPRFQQ

SEQ ID NO: 758 - protein, 30 aa, Homo sapiens
NTGRSPGNDCWGHRHHTHVAAHSPHHQGPQ

SEQ ID NO: 759 - protein, 30 aa, Homo sapiens
PLMKSLRIRNLHYINLQKKQRLWRKMFILM

SEQ ID NO: 760 - protein, 30 aa, Homo sapiens
QATSRRRLQTCFSNLVLRIQELRKEKSMMP

SEQ ID NO: 761 - protein, 30 aa, Homo sapiens
QTLRKKINPRTTVVKKQIPKEPNQNSSATP

SEQ ID NO: 762 - protein, 30 aa, Homo sapiens
RVYLLRITKKVEMITKTMKILEIQIAMMLY

SEQ ID NO: 763 - protein, 30 aa, Homo sapiens
SGAEQSASVLLWTRCTVRPDTTGYPTKICG

SEQ ID NO: 764 - protein, 30 aa, Homo sapiens
SPRSSVWERKSRPQTSRPPQLRKMFPPAAI

SEQ ID NO: 765 - protein, 30 aa, Homo sapiens
SSRKNATESQTYGFLPCPKELQEEQSRAAV

SEQ ID NO: 766 - skipped

SEQ ID NO: 767 - protein, 30 aa, Homo sapiens
TYCEPRGAAETGGVCDAGPRQLTGHVRNPV

SEQ ID NO: 768 - protein, 30 aa, Homo sapiens
WVHSLPVKKKRRLISAKSRFKEQKQNSTHW

SEQ ID NO: 769 - protein, 29 aa, Homo sapiens
ALLCLIALLSRKQTWKIRTCLRRVRQKCF

SEQ ID NO: 770 - protein, 29 aa, Homo sapiens
AVLCWKRQKTKSFGNCFRRGKKESLKRMP

SEQ ID NO: 771 - protein, 29 aa, Homo sapiens
CFCDDDDLQGVIPQPPNSLPRRQCGSGCG

SEQ ID NO: 772 - protein, 29 aa, Homo sapiens
CRIRERSLGGRLRPPTMARVTPSQLASMP

SEQ ID NO: 773 - protein, 29 aa, Homo sapiens
DVESQIHCRKERVRRDQITLLIQNLKQSI

SEQ ID NO: 774 - protein, 29 aa, Homo sapiens
EATSNQDLLQMVPCSMQDPLLSLWTLFTE

SEQ ID NO: 775 - protein, 29 aa, Homo sapiens
EDRTTKGYYSQNSQSKEEICDKSMWPCNF

SEQ ID NO: 776 - protein, 29 aa, Homo sapiens
EIQFKHPSDLFLVWLHRFQGYRDAYVRFD

SEQ ID NO: 777 - protein, 29 aa, Homo sapiens
EYCETGKRATNKQGKNNIKRRCKPTANNK

SEQ ID NO: 778 - protein, 29 aa, Homo sapiens
FNCNFSIRKMSTRGCQESRVASVYRKGQS

SEQ ID NO: 779 - protein, 29 aa, Homo sapiens
GNGSGGIKKSSKKTISFLQALIFLGSHTR

SEQ ID NO: 780 - protein, 29 aa, Homo sapiens
HSRAQNPGSLLLKNSLEFLIDPLMPSRTL

SEQ ID NO: 781 - protein, 29 aa, Homo sapiens
IHFCLSPFFYYKPHRTRSNLPRFMERFSC

SEQ ID NO: 782 - protein, 29 aa, Homo sapiens
KFRGRFGGSEGSDCPVGSLLSCSQKTVSR

SEQ ID NO: 783 - protein, 29 aa, Homo sapiens
KIWPNKFYQGLENLSPSSPWLTSESFLAS

SEQ ID NO: 784 - protein, 29 aa, Homo sapiens
KKKEDSTPFSLFRFLWNKQNCRWIQWNFL

SEQ ID NO: 785 - skipped

SEQ ID NO: 786 - protein, 29 aa, Homo sapiens
KNMKRLVRRRCPPLLKFYVRGFLQNSPCT

SEQ ID NO: 787 - protein, 29 aa, Homo sapiens
LLLENRPWKMSRHWDAPKRVNQKSLKILM

SEQ ID NO: 788 - skipped

SEQ ID NO: 789 - protein, 29 aa, Homo sapiens
LPSDITEDFECCPIPPCCQGQVSLYNVLQ

SEQ ID NO: 790 - protein, 29 aa, Homo sapiens
LSIKRKGKSRNTAEDTNKQRREGFLYRLT

SEQ ID NO: 791 - protein, 29 aa, Homo sapiens
NQGFTLAVSVCPGAAYGVCLGTGVQKRQL

SEQ ID NO: 792 - protein, 29 aa, Homo sapiens
PIAKMIEGTGSLRKLSGSSVNPRLPQQLQ

SEQ ID NO: 793 - protein, 29 aa, Homo sapiens
QEMVQKHLLSFFAICLEDFMQSQTEKRIL

SEQ ID NO: 794 - protein, 29 aa, Homo sapiens
QSCSNGKQFTKGKCWTYEALCGLITLQHN

SEQ ID NO: 795-796 - skipped (2 entries)

SEQ ID NO: 797 - protein, 29 aa, Homo sapiens
SPSGVPSSMGRSPRDGYDLLLFSHCEYIH

SEQ ID NO: 798 - protein, 29 aa, Homo sapiens
SQMLSPQRERKRRPSQLPQMPPTETSRPR

SEQ ID NO: 799 - protein, 29 aa, Homo sapiens
SRNSTEAIIIPTANRPSNGRNSADESRLL

SEQ ID NO: 800 - protein, 29 aa, Homo sapiens
SRSSVRRMEKSFAGFVNCLRNTKVTKHSA

SEQ ID NO: 801 - protein, 29 aa, Homo sapiens
SSKNSKSVHGPLSTSAAFYRNSEQIYLFL

SEQ ID NO: 802 - protein, 29 aa, Homo sapiens
SSKSRGICPWIACSAARPSHIQKTLINMS

SEQ ID NO: 803 - protein, 29 aa, Homo sapiens
VILVPQETENLMITKPLMILNGQMKRQNL

SEQ ID NO: 804 - protein, 29 aa, Homo sapiens
VLKGFWRWIQAMCKENTIFVLFILKKKTY

SEQ ID NO: 805 - protein, 29 aa, Homo sapiens
YSANLRNQTQRTPQQTQSNGPREASRKQT

SEQ ID NO: 806 - protein, 28 aa, Homo sapiens
DERRRRAKGLLQQGNRNLIKNQEPQWMK

SEQ ID NO: 807 - protein, 28 aa, Homo sapiens
DSEQNSELPQRVCGGRPAHLVHRQESSE

SEQ ID NO: 808 - protein, 28 aa, Homo sapiens
DTEIFFHMIQHAFLLEKARTTSMLVILE

SEQ ID NO: 809 - protein, 28 aa, Homo sapiens
DYQRLPSENRITWRRKSVFKICASICMR

SEQ ID NO: 810 - protein, 28 aa, Homo sapiens
EECTNVRGGATTGGQSQRQLSAATGQSP

SEQ ID NO: 811 - protein, 28 aa, Homo sapiens
EFQIQKILTLLKMRNTAKKEWIIKGTKI

SEQ ID NO: 812 - protein, 28 aa, Homo sapiens
FLEKEVQEAKKGLLRRYHQDFFQEILHL

SEQ ID NO: 813 - protein, 28 aa, Homo sapiens
FLNAKPSLDKLEKRKANIKKNLLRKCRN

SEQ ID NO: 814 - protein, 28 aa, Homo sapiens
GKSTSIINTELLLSTSSITSTPMKTMGF

SEQ ID NO: 815 - protein, 28 aa, Homo sapiens
GNITKRKKRREKRKSILLHLIVLNSPES

SEQ ID NO: 816-817 - skipped (2 entries)

SEQ ID NO: 818 - protein, 28 aa, Homo sapiens
ILGQEKTEVARNGNERSSASRRTEEINR

SEQ ID NO: 819 - protein, 28 aa, Homo sapiens
KGRASLVPEYTSAGEERPVPGGGSSTVS

SEQ ID NO: 820 - protein, 28 aa, Homo sapiens
KRLFSCALASLQELDDCSLAGLQIMCLV

SEQ ID NO: 821 - skipped

SEQ ID NO: 822 - protein, 28 aa, Homo sapiens
KSPGGITCQRSNFYFILCSRICFEIPRL

SEQ ID NO: 823 - protein, 28 aa, Homo sapiens
LHLLIGRNTRNSATLNYQVKIPMKQRCF

SEQ ID NO: 824 - protein, 28 aa, Homo sapiens
LLRKNIRHSHHHNQKVRSIKNWLVVNTF

SEQ ID NO: 825 - protein, 28 aa, Homo sapiens
LNSRWETKACPFQLESQTEASGTTGHRD

SEQ ID NO: 826 - skipped

SEQ ID NO: 827 - protein, 28 aa, Homo sapiens
LSAGRESTKGFKTCTSEGPIAKAKAKCR

SEQ ID NO: 828 - protein, 28 aa, Homo sapiens
LSRNCLLLLPQRRDRSMWILKLRKSLML

SEQ ID NO: 829 - skipped

SEQ ID NO: 830 - protein, 28 aa, Homo sapiens
NHHRRERSKGEGERIGKKLQSELQLHHP

SEQ ID NO: 831 - skipped

SEQ ID NO: 832 - protein, 28 aa, Homo sapiens
NKEKKESSPIEPRDHNEPSISEHVCWNV

SEQ ID NO: 833 - protein, 28 aa, Homo sapiens
NKSSFECSSKDKERECSCQPCRPGQGKF

SEQ ID NO: 834 - protein, 28 aa, Homo sapiens
NPCGGWEGAGSSRSLHQSHYFRRIREGF

SEQ ID NO: 835 - protein, 28 aa, Homo sapiens
NPDLPHPGPKESAGDVHQAEVRADEEGL

SEQ ID NO: 836 - protein, 28 aa, Homo sapiens
NQLLPVLWELCCRTGSWWPRMKSQPSQD

SEQ ID NO: 837 - protein, 28 aa, Homo sapiens
NRRRGFSGHKGKAVHQPPFPGCKGEDVH

SEQ ID NO: 838 - protein, 28 aa, Homo sapiens
NRSPGSDPFPYPEECDCHPQVCDTSTHC

SEQ ID NO: 839 - protein, 28 aa, Homo sapiens
NSISKNFSPMKSILRQEMLEPFLENAPF

SEQ ID NO: 840 - protein, 28 aa, Homo sapiens
NYSTLQISQKGRIYSRAAKDYQWEDKKK

SEQ ID NO: 841 - protein, 28 aa, Homo sapiens
PMNVIIAGNPSQVTPTFLCIRECIIGKC

SEQ ID NO: 842 - protein, 28 aa, Homo sapiens
PVQCASKKLFLLKAIQTLTQTVVKKKMK

SEQ ID NO: 843 - protein, 28 aa, Homo sapiens
QFQMWISISLTSALAVAMLSFQYLCPCL

SEQ ID NO: 844 - protein, 28 aa, Homo sapiens
QKTSLWQSLKLIKNRTVKWRRVEEKIWI

SEQ ID NO: 845 - protein, 28 aa, Homo sapiens
RGGRKLGRLGKSNQANCREICMHHKDIS

SEQ ID NO: 846 - protein, 28 aa, Homo sapiens
RISPLLTILEIFYLKKRKQLLSFQQICQ

SEQ ID NO: 847 - skipped

SEQ ID NO: 848 - protein, 28 aa, Homo sapiens
RRRQSGGKRGREMGGKSKWNRSHQQLCF

SEQ ID NO: 849 - protein, 28 aa, Homo sapiens
SLILFPPLIIQRLTIHHLKKTFTMSMKR

SEQ ID NO: 850 - protein, 28 aa, Homo sapiens
SQKSATASCAHTTPTLKSSLQKSISAWP

SEQ ID NO: 851-852 - skipped (2 entries)

SEQ ID NO: 853 - protein, 28 aa, Homo sapiens
TPGRTRSTTSQHICGSRRQHFNWIRSLL

SEQ ID NO: 854 - protein, 28 aa, Homo sapiens
TRVLYEFLQPGSQRYAAQPHGPLCIQLP

SEQ ID NO: 855 - protein, 28 aa, Homo sapiens
TWGEAGCCQRQNDAAGVSWDTADRCHED

SEQ ID NO: 856 - protein, 28 aa, Homo sapiens
VVNLGHSCCLDPETRLLRCGMSVLACAL

SEQ ID NO: 857 - protein, 28 aa, Homo sapiens
VWLVKRIIQTLTKRRKKKRVFRKEKTMN

SEQ ID NO: 858 - protein, 28 aa, Homo sapiens
WKRFVVVTNHFWPQMTCRPNTCNLRKNL

SEQ ID NO: 859 - protein, 28 aa, Homo sapiens
WRGKLFKYTLQCNKNSRTYCKRNEDEDI

SEQ ID NO: 860 - protein, 27 aa, Homo sapiens
EITLCKADQEKVPPLQRQKKIHFLKDL

SEQ ID NO: 861 - protein, 27 aa, Homo sapiens
FILEENPTNVKNVAKLLTSSQLLLNIR

SEQ ID NO: 862 - protein, 27 aa, Homo sapiens
FILERNPISVKNVAKALFCPLILLHIR

SEQ ID NO: 863 - protein, 27 aa, Homo sapiens
FILERNPTNVRNVAKLLTNSQTLLDIR

SEQ ID NO: 864 - protein, 27 aa, Homo sapiens
FILKRNLTNVKIVAKSLVYFQSLLNIR

SEQ ID NO: 865 - protein, 27 aa, Homo sapiens
FISLSVDYIGYTGKMSCWATKGHNEIR

SEQ ID NO: 866 - protein, 27 aa, Homo sapiens
FWIVCSGEEGWIEKKAAARGRATKSKN

SEQ ID NO: 867 - protein, 27 aa, Homo sapiens
GIQASPLQEVTGPPRRCLTGLPPVVCK

SEQ ID NO: 868 - protein, 27 aa, Homo sapiens
GKNQLKHVQAFLWKNSLRTQLVHLAFL

SEQ ID NO: 869 - protein, 27 aa, Homo sapiens
GLSLSYGPVSPIIRRLWNIFVRNQEKI

SEQ ID NO: 870 - protein, 27 aa, Homo sapiens
KCLKVSGQKRERERSSWHLVLTLQRRP

SEQ ID NO: 871 - protein, 27 aa, Homo sapiens
KEDDDFRNCFPRRRCYYTVDVICRSKD

SEQ ID NO: 872 - protein, 27 aa, Homo sapiens
KKRKKKRKPTGRYRQSNHPLRHPDARQ

SEQ ID NO: 873 - protein, 27 aa, Homo sapiens
KLKFKFLYNTFFGNSHSLNKSKTPTSD

SEQ ID NO: 874 - protein, 27 aa, Homo sapiens
KNCCLMMGMTSWPPWGLETAPKQRRGR

SEQ ID NO: 875 - protein, 27 aa, Homo sapiens
KPLTKGTCFGSNKGTGKPSSQRLQRYN

SEQ ID NO: 876 - protein, 27 aa, Homo sapiens
KRRKGRKSQQMMSLGVGTPGAEGGSPY

SEQ ID NO: 877 - protein, 27 aa, Homo sapiens
KSKLQHISVGKFVCSNQPMYLSASQGP

SEQ ID NO: 878 - skipped

SEQ ID NO: 879 - protein, 27 aa, Homo sapiens
KTQIANAQDRRELEKIPTMSRRVKSSS

SEQ ID NO: 880 - protein, 27 aa, Homo sapiens
KTTRGCLQKTELLGGESLFSRFVLQFV

SEQ ID NO: 881 - protein, 27 aa, Homo sapiens
LILEEKVVIKGIPLDHWTMKVSNKNLL

SEQ ID NO: 882 - protein, 27 aa, Homo sapiens
LILERNHTNVKNVAKPSTGPHTLLHIR

SEQ ID NO: 883 - protein, 27 aa, Homo sapiens
LIVEKSHMNVQGVVKPLGGAVPSEDMK

SEQ ID NO: 884 - protein, 27 aa, Homo sapiens
LVLVVVQIQNGLGRGTNILKLIMKGRC

SEQ ID NO: 885 - skipped

SEQ ID NO: 886 - protein, 27 aa, Homo sapiens
LWKIYTVTIHHISLWPLNYGRLLKDII

SEQ ID NO: 887 - protein, 27 aa, Homo sapiens
MFRSQTRCMRNAKRNWPLPGLFSSLVV

SEQ ID NO: 888 - protein, 27 aa, Homo sapiens
MQRSIPAFWKVLWTDPYSATIRTHHQD

SEQ ID NO: 889 - protein, 27 aa, Homo sapiens
NAASTAAASGPRERGKLCKRHQTSSFW

SEQ ID NO: 890 - skipped

SEQ ID NO: 891 - protein, 27 aa, Homo sapiens
NGSRQNSHELQDPPSQVHSVRAVPGRP

SEQ ID NO: 892 - protein, 27 aa, Homo sapiens
NHGRIWNRDYVGETETRLQTRAKQSDK

SEQ ID NO: 893 - protein, 27 aa, Homo sapiens
NILIQAHCLFSQYLVTICTTSGNHCFT

SEQ ID NO: 894 - protein, 27 aa, Homo sapiens
NMLSPIFCHLPFYHWLHYIWNYSSGYI

SEQ ID NO: 895 - skipped

SEQ ID NO: 896 - protein, 27 aa, Homo sapiens
NPTTKICAEYSARTDQCRGGGLLTLKY

SEQ ID NO: 897 - protein, 27 aa, Homo sapiens
NRERKLSGKQNDLTRSLPTKFSGAVRA

SEQ ID NO: 898 - protein, 27 aa, Homo sapiens
NRITEGPCKCTCCCTKRTTRTKEKGGL

SEQ ID NO: 899 - protein, 27 aa, Homo sapiens
NVSSTRVFLGHGGRCENSRHQKSQPDP

SEQ ID NO: 900 - protein, 27 aa, Homo sapiens
PLRPSGESGLSDLGTSAGREALALRNN

SEQ ID NO: 901 - protein, 27 aa, Homo sapiens
PRLCCRFISAPSRPRGFKTTRIFWEVW

SEQ ID NO: 902 - protein, 27 aa, Homo sapiens
QARPKRGSGKNKEISKRNGNFRRPSSI

SEQ ID NO: 903 - protein, 27 aa, Homo sapiens
QKHETRRKSKYNEDFERAWREDLTIKR

SEQ ID NO: 904 - protein, 27 aa, Homo sapiens
QKHWIDHSIFCYLYSRGNISRVNKNAF

SEQ ID NO: 905 - protein, 27 aa, Homo sapiens
QSKALQPLMTFLKGNISMVHTTTILYL

SEQ ID NO: 906 - protein, 27 aa, Homo sapiens
RMMSESNLNIEEKKESFSSPDQLNWKI

SEQ ID NO: 907 - protein, 27 aa, Homo sapiens
RNTSQIRLPLYPARTPASGIQRNDEQQ

SEQ ID NO: 908 - protein, 27 aa, Homo sapiens
RQTRRGREKKGPTRTVMRSPSSLLPRL

SEQ ID NO: 909 - protein, 27 aa, Homo sapiens
SFQCRAAADLWNDGNSCEIMGTNLCHF

SEQ ID NO: 910 - protein, 27 aa, Homo sapiens
SISPASGLCRSALGLCQVSPAVGTEGF

SEQ ID NO: 911 - protein, 27 aa, Homo sapiens
SQYIAGGEIRTGCRGRNTVKSEQFSSE

SEQ ID NO: 912 - protein, 27 aa, Homo sapiens
SRGPKRQRWRRRPVVNLVLCLHETVNT

SEQ ID NO: 913 - protein, 27 aa, Homo sapiens
SRNSTEAIIIPTANRPSNGRNSADESS

SEQ ID NO: 914 - protein, 27 aa, Homo sapiens
SSANVIALICLSRLTQINLLEQTAGQI

SEQ ID NO: 915 - protein, 27 aa, Homo sapiens
TLMGLLKWILKQIKILRGARALIISSK

SEQ ID NO: 916 - protein, 27 aa, Homo sapiens
VLYPAGQGASRDGALCTRFISTCSYQL

SEQ ID NO: 917 - protein, 27 aa, Homo sapiens
VSTVVGLTSLCTTCDEWTQRAGWSAGQ

SEQ ID NO: 918 - protein, 27 aa, Homo sapiens
WMAYTWKKWYRKHKSSRWIPWWKFPFS

SEQ ID NO: 919 - protein, 27 aa, Homo sapiens
YRSAGIKNLAMEFWLHEWHQQQQVALH

SEQ ID NO: 920 - protein, 26 aa, Homo sapiens
ARCFLIIELGGLIKLKLNRLNLINIF

SEQ ID NO: 921 - protein, 26 aa, Homo sapiens
ATNSKTIPLLAQDQPGVDLGMGTSGL

SEQ ID NO: 922 - protein, 26 aa, Homo sapiens
CMTCWGRTCCGGSKPMCSRTCPPRQN

SEQ ID NO: 923 - protein, 26 aa, Homo sapiens
DILMKMLLRTLKNMKVWSINLLKNPL

SEQ ID NO: 924 - protein, 26 aa, Homo sapiens
DVQKNWSSKKENMKIQITKLNWETLI

SEQ ID NO: 925 - protein, 26 aa, Homo sapiens
EENCLRNRNKKLKMLLNYLIQTKMKQ

SEQ ID NO: 926 - protein, 26 aa, Homo sapiens
EFLFVRSKAFFPRYLASSLVQTLFNG

SEQ ID NO: 927 - protein, 26 aa, Homo sapiens
ETQKKHVPSVLLKKVMKNLKMMMMMI

SEQ ID NO: 928 - protein, 26 aa, Homo sapiens
FGAKLRITSTCMRRKACAPCASPREF

SEQ ID NO: 929 - protein, 26 aa, Homo sapiens
FIHSRRMSLASLWVRPYQSCRLEKWR

SEQ ID NO: 930 - protein, 26 aa, Homo sapiens
GGAPLPSWSPPCQSLRQAVTSSRTSG

SEQ ID NO: 931 - protein, 26 aa, Homo sapiens
GIYFMLQTPTITRLKLWIQKQKTVQH

SEQ ID NO: 932 - protein, 26 aa, Homo sapiens
GMTFVNRIRKHHQIVAQLYFRSFSVL

SEQ ID NO: 933 - protein, 26 aa, Homo sapiens
HRNVQCHDAVEENGQSSFITSPILHS

SEQ ID NO: 934 - protein, 26 aa, Homo sapiens
IAGNGFFYSGFNGQAPSGSKYRAVTI

SEQ ID NO: 935 - protein, 26 aa, Homo sapiens
IHATLQSHLCTFQHLPVLLKQIQLLS

SEQ ID NO: 936 - skipped

SEQ ID NO: 937 - protein, 26 aa, Homo sapiens
KEETNSFRRLGFLFQFLLFFRIIFRK

SEQ ID NO: 938 - protein, 26 aa, Homo sapiens
KKKVMSASSYGENQRIRNSLQNGSRE

SEQ ID NO: 939 - protein, 26 aa, Homo sapiens
KRSCKMNRKTKGKGKMRNRNSIPRKD

SEQ ID NO: 940 - protein, 26 aa, Homo sapiens
KTLQTSFQPVCLKHHSFLKDSYALCL

SEQ ID NO: 941 - protein, 26 aa, Homo sapiens
KYTKIRLKNKRNLKGKYKLKKLDTAL

SEQ ID NO: 942 - skipped

SEQ ID NO: 943 - protein, 26 aa, Homo sapiens
LLKIWKHQNLQRAMKLQKLHLWVTGI

SEQ ID NO: 944 - protein, 26 aa, Homo sapiens
LQQKYYSRLRNHWHWQVGLCQTGVNN

SEQ ID NO: 945 - protein, 26 aa, Homo sapiens
NEEERTGCPRGCPASAPTAPPVHHSP

SEQ ID NO: 946 - protein, 26 aa, Homo sapiens
NETSWYQRPVHRCSGEVRDSAGIFFL

SEQ ID NO: 947 - protein, 26 aa, Homo sapiens
NKTQRQPSNFRSVHTLEQGLWRYHCL

SEQ ID NO: 948 - protein, 26 aa, Homo sapiens
NPQADTQICGGWCGGEHHHLQDHQRR

SEQ ID NO: 949 - protein, 26 aa, Homo sapiens
NSLPQLWEWSTYCPCNNRRRSLYLGS

SEQ ID NO: 950 - protein, 26 aa, Homo sapiens
PTGSRSGQIPMPNTSTARRTRMRSGT

SEQ ID NO: 951 - protein, 26 aa, Homo sapiens
QFTITQSLANAQFSQQQMLLSNLLVK

SEQ ID NO: 952 - protein, 26 aa, Homo sapiens
QKTLKTSVLISPMIFSLSQIQFIGKQ

SEQ ID NO: 953 - protein, 26 aa, Homo sapiens
RGECYADPPAVVGHPGCIPRHPGDER

SEQ ID NO: 954 - skipped

SEQ ID NO: 955 - protein, 26 aa, Homo sapiens
SGLQHLQEVSSGGHPLPHHIPTSLWF

SEQ ID NO: 956 - protein, 26 aa, Homo sapiens
TKMKVIMPYVTWKVVGKSSRRKKQRA

SEQ ID NO: 957 - protein, 26 aa, Homo sapiens
TQRFWRINQDLEFQTVIPIPVCSMFR

SEQ ID NO: 958 - protein, 26 aa, Homo sapiens
WIRKTKLESASFRYFFVWRCVCNALQ

SEQ ID NO: 959 - protein, 26 aa, Homo sapiens
YQDQLLVQNLDIMISSQFQLEPPTSK

SEQ ID NO: 960 - protein, 26 aa, Homo sapiens
YRSYAPRHCSSSEKQQECIYLWDDWN

SEQ ID NO: 961 - protein, 25 aa, Homo sapiens
AVAASGGSDSTEEAREQPPGGDPTL

SEQ ID NO: 962 - protein, 25 aa, Homo sapiens
CHPNRGVYALGLHVLQPDLHTFRRP

SEQ ID NO: 963 - protein, 25 aa, Homo sapiens
CLTRLYQSVLSMTTRIFLNKLLKID

SEQ ID NO: 964 - protein, 25 aa, Homo sapiens
CSVRSIGRGFYLSLKFYYCFITQTY

SEQ ID NO: 965 - protein, 25 aa, Homo sapiens
DPCQPSPGPAEGTPRYSPAVDTGRV

SEQ ID NO: 966 - protein, 25 aa, Homo sapiens
ECPSFPSISMSVLYIDTMFNGTGVF

SEQ ID NO: 967 - protein, 25 aa, Homo sapiens
EDNTRELWEYPQKRTMCCFQQSICI

SEQ ID NO: 968 - protein, 25 aa, Homo sapiens
EGRSSTNARSATVCLTAGTSSKITW

SEQ ID NO: 969 - protein, 25 aa, Homo sapiens
ESPECCTKCFANQLKQFYKQRISSC

SEQ ID NO: 970 - protein, 25 aa, Homo sapiens
FLLGPRPPMSWLERWIFWTVPLLPL

SEQ ID NO: 971 - protein, 25 aa, Homo sapiens
FNVKLHSSLYHSFFLHSSIYKMSFS

SEQ ID NO: 972 - protein, 25 aa, Homo sapiens
FSSSMMKVFEGTWNRLNKEKKKLLS

SEQ ID NO: 973 - protein, 25 aa, Homo sapiens
GGHEQSKFGGYKALDNKKSNGNPWV

SEQ ID NO: 974 - protein, 25 aa, Homo sapiens
GMERQYFSPKSNSPPRSIQKQSPAF

SEQ ID NO: 975 - protein, 25 aa, Homo sapiens
GRLQKLQMLSLSHCHLQNQNLLKLR

SEQ ID NO: 976 - protein, 25 aa, Homo sapiens
HFSIPKNVDSAVWICFGSWMCSSYH

SEQ ID NO: 977 - protein, 25 aa, Homo sapiens
HHVGRTAWVFALVVVCILGPLLCSS

SEQ ID NO: 978 - protein, 25 aa, Homo sapiens
HRMSRNGSRKGWLILLITLASAGQN

SEQ ID NO: 979 - protein, 25 aa, Homo sapiens
HSQPLKTWAQHTPATLSSAQPRRDI

SEQ ID NO: 980 - protein, 25 aa, Homo sapiens
IKVQAGREKRRLHSWVWCRTFHSRH

SEQ ID NO: 981 - protein, 25 aa, Homo sapiens
KGGAISCLSCRGFCSFWCTNWRSSF

SEQ ID NO: 982 - protein, 25 aa, Homo sapiens
KKECRNYVAGCNDLPQTEWYSFHLL

SEQ ID NO: 983 - protein, 25 aa, Homo sapiens
KKRTCKSRTQPKSGFRGKARKAPKK

SEQ ID NO: 984 - protein, 25 aa, Homo sapiens
KMMVKCLKKKRKVNLRKRVKKKLKS

SEQ ID NO: 985 - skipped

SEQ ID NO: 986 - protein, 25 aa, Homo sapiens
LCGAVRINRFFLLMTKLFDFGIMLL

SEQ ID NO: 987 - protein, 25 aa, Homo sapiens
LGNRGCCCLGLQRECSLRNLHRRYR

SEQ ID NO: 988 - protein, 25 aa, Homo sapiens
LKILFNLCILMLLYIRKVMFTPVAK

SEQ ID NO: 989 - protein, 25 aa, Homo sapiens
LMTCRVNLIKEKKILKRKFINLRKL

SEQ ID NO: 990 - protein, 25 aa, Homo sapiens
LTTERKVEKRWIGNMTKKSLKKRGI

SEQ ID NO: 991 - protein, 25 aa, Homo sapiens
LWNLHLAKGQFIKMQTAWKKKRRHL

SEQ ID NO: 992 - skipped

SEQ ID NO: 993 - protein, 25 aa, Homo sapiens
MNFLHHPDLYLESDEVAWLKMLCVN

SEQ ID NO: 994 - protein, 25 aa, Homo sapiens
MRSRTYYPLAITDTVEQSKRRMKSY

SEQ ID NO: 995 - protein, 25 aa, Homo sapiens
MTTVAGEKSWKNARVWSTSHFEAKE

SEQ ID NO: 996 - protein, 25 aa, Homo sapiens
NFLLSGTVNSEIWNASEYTSYQRDS

SEQ ID NO: 997 - skipped

SEQ ID NO: 998 - protein, 25 aa, Homo sapiens
NKENQKEQTALYRGGQRCRCVCLRF

SEQ ID NO: 999 - protein, 25 aa, Homo sapiens
NRTCPFRLFVRRMLQFTGNKVLDRP

SEQ ID NO: 1000 - protein, 25 aa, Homo sapiens
NSPEGANCLSEERICSTFLLHTMHH

SEQ ID NO: 1001 - protein, 25 aa, Homo sapiens
NTSGKRFYTQTARGSPASSNGKDTP

SEQ ID NO: 1002 - protein, 25 aa, Homo sapiens
PGAAPSASALAFLMSAAASLGLLVR

SEQ ID NO: 1003 - protein, 25 aa, Homo sapiens
PNLQWIFIKRFPYLIRTTLYFHPLE

SEQ ID NO: 1004 - protein, 25 aa, Homo sapiens
QHQEGFILRRLSQTYLHWKTVAALQ

SEQ ID NO: 1005 - protein, 25 aa, Homo sapiens
QKEEEEKGKTTQESQKTKERNKGEK

SEQ ID NO: 1006 - protein, 25 aa, Homo sapiens
QPSIFPGIFIFSNLTFATLFHTIWE

SEQ ID NO: 1007 - protein, 25 aa, Homo sapiens
QSADQCKEYLPMYCSILLEFPLQLE

SEQ ID NO: 1008 - protein, 25 aa, Homo sapiens
RKRKKNMWNQQSHQRKNTQFQVTNK

SEQ ID NO: 1009 - protein, 25 aa, Homo sapiens
RSFPPETKRIPLGSSWPSRRQSSHP

SEQ ID NO: 1010 - protein, 25 aa, Homo sapiens
RSTSTKHLLFSSRTHGNPGDRPHRC

SEQ ID NO: 1011 - protein, 25 aa, Homo sapiens
SEKMRLSLVIRHKIGRFLITILKRI

SEQ ID NO: 1012 - protein, 25 aa, Homo sapiens
SKAKILSSSEMGLGKLILCFPTLMM

SEQ ID NO: 1013 - protein, 25 aa, Homo sapiens
SQVERSLILWLSMALFVPRTLHIKR

SEQ ID NO: 1014 - protein, 25 aa, Homo sapiens
SRSSISIFKFMMKILSMGPSCQSVF

SEQ ID NO: 1015 - protein, 25 aa, Homo sapiens
SWKILVSKWFQKMAIYSYTLIKEVF

SEQ ID NO: 1016 - protein, 25 aa, Homo sapiens
TKIFQKKKIHKIRILLWIVKERPTK

SEQ ID NO: 1017 - protein, 25 aa, Homo sapiens
TPENSLQQVAREHGSTPHRKDSLTR

SEQ ID NO: 1018 - protein, 25 aa, Homo sapiens
TQGSKELRAHQASAPEVCTDLCSRP

SEQ ID NO: 1019 - protein, 25 aa, Homo sapiens
WGHWRADLEAKGCERESRKRSPINQ

SEQ ID NO: 1020 - protein, 25 aa, Homo sapiens
WKMRRLQFSHVHLNHPNQKQSISWM

SEQ ID NO: 1021 - protein, 25 aa, Homo sapiens
WMTKHIVISRNWKIMLKTHRALFFT

SEQ ID NO: 1022 - protein, 25 aa, Homo sapiens
YIMNKSKLFKNSATSLANQNLKLKT

SEQ ID NO: 1023 - protein, 24 aa, Homo sapiens
ANSKLSSSLLLRKHSCGQKHLTSC

SEQ ID NO: 1024 - protein, 24 aa, Homo sapiens
ATNIIAKLWRMMTLNLKDQKILGK

SEQ ID NO: 1025 - protein, 24 aa, Homo sapiens
CMSSSPKWKIFSASWKRKDNKFIS

SEQ ID NO: 1026 - protein, 24 aa, Homo sapiens
EEQPILKKNIHAMNVGNLSAGNQY

SEQ ID NO: 1027 - protein, 24 aa, Homo sapiens
GCCRLLTEMGKRKRKRRSHWMKAQ

SEQ ID NO: 1028 - protein, 24 aa, Homo sapiens
GERNIQHVIAQNNLLSILMKILHK

SEQ ID NO: 1029 - protein, 24 aa, Homo sapiens
GWQKCNWPGPGMYFKKSSTKKALS

SEQ ID NO: 1030 - protein, 24 aa, Homo sapiens
GYLIFQQKSQALIRNKDSKRLIFR

SEQ ID NO: 1031 - protein, 24 aa, Homo sapiens
GYLILQQKSQALIRNKDSKRLIFR

SEQ ID NO: 1032 - skipped

SEQ ID NO: 1033 - protein, 24 aa, Homo sapiens
HLWISLIFFMNSVNLSSPKASLLR

SEQ ID NO: 1034 - protein, 24 aa, Homo sapiens
IAIKRNICQSPGGHVDLPQPLLCF

SEQ ID NO: 1035 - protein, 24 aa, Homo sapiens
IARRYLESFSVFSCFSGRLSVLFL

SEQ ID NO: 1036 - protein, 24 aa, Homo sapiens
ILKLTLKMILTLMYILEKQRLLLF

SEQ ID NO: 1037 - protein, 24 aa, Homo sapiens
KAAQFLHSRRKFRKKCHVLICRWT

SEQ ID NO: 1038 - protein, 24 aa, Homo sapiens
KGEPFQGTSKTEQNLKGTSKTNQG

SEQ ID NO: 1039 - protein, 24 aa, Homo sapiens
KHDCFNSYHSSLFGFVLKPKWRSD

SEQ ID NO: 1040 - protein, 24 aa, Homo sapiens
KKGTNQQASREERKGKIKSYQCRI

SEQ ID NO: 1041 - protein, 24 aa, Homo sapiens
KKVKLLHENMDSSSWKRLLRLLPM

SEQ ID NO: 1042 - protein, 24 aa, Homo sapiens
KKVKSLYMMILKLSKVSHKEVEQK

SEQ ID NO: 1043 - protein, 24 aa, Homo sapiens
KLPFPPRSGGQQEEQVSLARPHLR

SEQ ID NO: 1044 - protein, 24 aa, Homo sapiens
KSCVPGWCRWKTKFYRQRTLVLKK

SEQ ID NO: 1045 - protein, 24 aa, Homo sapiens
KTLPLIQGKMLCPQGPTVRQNRHQ

SEQ ID NO: 1046 - protein, 24 aa, Homo sapiens
LFLQKRSQSSSGSFCSSSPCQIRS

SEQ ID NO: 1047 - protein, 24 aa, Homo sapiens
LKLPRLLPHTPPPAPSSSLSPLVS

SEQ ID NO: 1048 - protein, 24 aa, Homo sapiens
LLDKFWCLFYCTAPSIAPTCGQAF

SEQ ID NO: 1049 - protein, 24 aa, Homo sapiens
LLGFQGPLGCLLQEAAARSREPLI

SEQ ID NO: 1050 - protein, 24 aa, Homo sapiens
LLLGNQIHSILLGKITYYVCAMIS

SEQ ID NO: 1051 - protein, 24 aa, Homo sapiens
LSTHKCFRTSNYVPFRSNKYGNHI

SEQ ID NO: 1052 - protein, 24 aa, Homo sapiens
LTGKETQKLYGRPCREKRNGIGFK

SEQ ID NO: 1053 - protein, 24 aa, Homo sapiens
NEREGEEKGKGQIESQGEKAQRGE

SEQ ID NO: 1054 - protein, 24 aa, Homo sapiens
NQTQQRNWEENWKYRKYIKHKRTL

SEQ ID NO: 1055 - protein, 24 aa, Homo sapiens
NSQQTSARNTYLCTAQYFWNFHSS

SEQ ID NO: 1056 - protein, 24 aa, Homo sapiens
NTTGMCSRRNYISPSTLVFNERVY

SEQ ID NO: 1057 - protein, 24 aa, Homo sapiens
PSSKAKSRGKELSHILCTAGRAGT

SEQ ID NO: 1058 - protein, 24 aa, Homo sapiens
QDILQAKETEWHKVRAREEKLRKF

SEQ ID NO: 1059 - protein, 24 aa, Homo sapiens
QKHFSILNLPQKQISHIVSQRRDI

SEQ ID NO: 1060 - protein, 24 aa, Homo sapiens
QNRASCLDAWANQKGELMYRLILK

SEQ ID NO: 1061 - protein, 24 aa, Homo sapiens
QPSPASGYLQSMSGTGTSMWPSQH

SEQ ID NO: 1062 - protein, 24 aa, Homo sapiens
RDHMMWWFYQEVIWAHRIYLSLLL

SEQ ID NO: 1063 - protein, 24 aa, Homo sapiens
RGPETTIFLLLPISIISAANFMSF

SEQ ID NO: 1064 - protein, 24 aa, Homo sapiens
RHFLEVEGKLNKEIIHRMKMGFKN

SEQ ID NO: 1065 - skipped

SEQ ID NO: 1066 - protein, 24 aa, Homo sapiens
RKKDHFRNDTNTQKAWLLHLGRSL

SEQ ID NO: 1067 - protein, 24 aa, Homo sapiens
RLQVGRILASYEEFFLNGRRRYHV

SEQ ID NO: 1068 - protein, 24 aa, Homo sapiens
RNGMRRKKVHPRLKDHFRKNLPKK

SEQ ID NO: 1069 - protein, 24 aa, Homo sapiens
SIPVSLEAQVECSSHSSKQTKLTM

SEQ ID NO: 1070 - protein, 24 aa, Homo sapiens
SISAGTHVPGPPGQEKPVHRRQRG

SEQ ID NO: 1071 - protein, 24 aa, Homo sapiens
SKNMSGLRPRFLCRTRFFCWAPRS

SEQ ID NO: 1072 - protein, 24 aa, Homo sapiens
SLMSKKWKKAALLSTLNLQTWKMK

SEQ ID NO: 1073 - protein, 24 aa, Homo sapiens
SRYEWNLESLNGQNGKLAKPPQPS

SEQ ID NO: 1074 - protein, 24 aa, Homo sapiens
STALSQSLCSTFGPGTRHQSSVPT

SEQ ID NO: 1075 - protein, 24 aa, Homo sapiens
STERAYSRRAGDGLPACGRRGGVL

SEQ ID NO: 1076 - protein, 24 aa, Homo sapiens
STFQIIFQSANANGNLNCCRSMGY

SEQ ID NO: 1077 - protein, 24 aa, Homo sapiens
STIYLRKKMKTLKPAGKILLFCKN

SEQ ID NO: 1078 - protein, 24 aa, Homo sapiens
SWEDLEQRLRWRNRNPSPNQGQTK

SEQ ID NO: 1079 - protein, 24 aa, Homo sapiens
TKISNGRPINRSSSILDRLQPHGG

SEQ ID NO: 1080 - protein, 24 aa, Homo sapiens
TRKDKQSSPWAKTISTRQIISNII

SEQ ID NO: 1081 - protein, 23 aa, Homo sapiens
DQPCIWPVQVSTWPVPSFSCSRD

SEQ ID NO: 1082 - skipped

SEQ ID NO: 1083 - protein, 23 aa, Homo sapiens
EGKEKMRWKKSQQLCKKLTKRKF

SEQ ID NO: 1084 - protein, 23 aa, Homo sapiens
EQRKPWKKRSYLKNCGSQVKRST

SEQ ID NO: 1085 - protein, 23 aa, Homo sapiens
HFLHVLPTWWSCPFLMAAASSCM

SEQ ID NO: 1086 - protein, 23 aa, Homo sapiens
HFSSFLVDPLTFRRKTMALAFLL

SEQ ID NO: 1087 - skipped

SEQ ID NO: 1088 - protein, 23 aa, Homo sapiens
KEKGKGNDERWKQTRRSVDKSIC

SEQ ID NO: 1089 - protein, 23 aa, Homo sapiens
KFRVQIIYSKRTCVKTLWAEFYL

SEQ ID NO: 1090 - protein, 23 aa, Homo sapiens
KLEKVVVQLTLLNMKIKNGEMKV

SEQ ID NO: 1091 - protein, 23 aa, Homo sapiens
KVGSGFLGKNYLPWTSFSGDCVV

SEQ ID NO: 1092 - protein, 23 aa, Homo sapiens
LLQESVIQTPKKTRISSVLTIMR

SEQ ID NO: 1093 - protein, 23 aa, Homo sapiens
LQETMDQVIILHFRVHLPQLSGI

SEQ ID NO: 1094 - protein, 23 aa, Homo sapiens
LRLHLPRYLDFFMTKKMKAIWIP

SEQ ID NO: 1095 - protein, 23 aa, Homo sapiens
LTVALRQPLPVVATHLGIASTKN

SEQ ID NO: 1096 - protein, 23 aa, Homo sapiens
NAPGEEEETEQESHLLGRRSRQD

SEQ ID NO: 1097 - protein, 23 aa, Homo sapiens
NFYILRGKTEASYRYCFTWSNRS

SEQ ID NO: 1098 - protein, 23 aa, Homo sapiens
NLASHTKAPATSASSCCTRFFEN

SEQ ID NO: 1099 - protein, 23 aa, Homo sapiens
NSCTKERRVYADAGILYQTASIC

SEQ ID NO: 1100 - protein, 23 aa, Homo sapiens
NTTEVQSLSCENLHFQSKQVPED

SEQ ID NO: 1101 - protein, 23 aa, Homo sapiens
NVEGCIQSTSIFRSLEQPSWKSA

SEQ ID NO: 1102 - protein, 23 aa, Homo sapiens
PKGKDDDFHKGHKCKLISINRFY

SEQ ID NO: 1103 - protein, 23 aa, Homo sapiens
PVKILNKTRMLQKNGLPLLSKVN

SEQ ID NO: 1104 - skipped

SEQ ID NO: 1105 - protein, 23 aa, Homo sapiens
QLCQKRLYPPEIVTLLISGYLPS

SEQ ID NO: 1106 - protein, 23 aa, Homo sapiens
QLLTHREMGKSRGPKCQSSQNDF

SEQ ID NO: 1107 - protein, 23 aa, Homo sapiens
QRKSSKMMHWPLKSSFEKMTRDL

SEQ ID NO: 1108 - protein, 23 aa, Homo sapiens
QRNLQVQDAFLPTVWALVRLYRW

SEQ ID NO: 1109 - protein, 23 aa, Homo sapiens
QRRKRTFANGIEKETSKLGKMMV

SEQ ID NO: 1110 - protein, 23 aa, Homo sapiens
QSQCWRRRCWTMMGVAWPPSLNP

SEQ ID NO: 1111 - protein, 23 aa, Homo sapiens
QSTCCPVASGSSWSTTSRSWKCC

SEQ ID NO: 1112 - protein, 23 aa, Homo sapiens
QTQRRIPHSPSQIPVPLPEIWCT

SEQ ID NO: 1113 - protein, 23 aa, Homo sapiens
RNVCYTGRKREGYMEKLRFWLSV

SEQ ID NO: 1114 - protein, 23 aa, Homo sapiens
RPEGTERTQGEKRAQGTQDPESP

SEQ ID NO: 1115 - protein, 23 aa, Homo sapiens
RPLKLFLEKSHQLKYRRCLRKLW

SEQ ID NO: 1116 - protein, 23 aa, Homo sapiens
RRMLRGSSSGCGAPRMYPKTSRR

SEQ ID NO: 1117 - protein, 23 aa, Homo sapiens
RSPRDAWFNGKQWLTRPAWNTGI

SEQ ID NO: 1118 - protein, 23 aa, Homo sapiens
SGRTVWIMVSPCSTRSEFLARAF

SEQ ID NO: 1119 - protein, 23 aa, Homo sapiens
SLSPPHPVLLSIPWTQIPQGCLP

SEQ ID NO: 1120 - protein, 23 aa, Homo sapiens
SNMVCSFLLFNRTWITFMCFSIH

SEQ ID NO: 1121 - protein, 23 aa, Homo sapiens
STLCSRKSQIPSSPKWLSTGPRP

SEQ ID NO: 1122 - protein, 23 aa, Homo sapiens
STRNTEVLFQTYLMEQSLVQCSV

SEQ ID NO: 1123 - protein, 23 aa, Homo sapiens
SVGENSERNSPSPGAGRFGIGYL

SEQ ID NO: 1124 - protein, 23 aa, Homo sapiens
SVQKRVAAVRKSCRDGTVDPVGT

SEQ ID NO: 1125 - protein, 23 aa, Homo sapiens
SYLNILPALFDVLIVASVLKLKI

SEQ ID NO: 1126 - protein, 23 aa, Homo sapiens
SYTKGQRQEEAGPPGECRPGLSP

SEQ ID NO: 1127 - protein, 23 aa, Homo sapiens
TAGCFTGDSYFTHNPNIPGFFSC

SEQ ID NO: 1128 - protein, 23 aa, Homo sapiens
TAPPEACHGPLFLSSAVSSIGCK

SEQ ID NO: 1129 - protein, 23 aa, Homo sapiens
TFYPSLPGTFQEDVCVKRRPMAL

SEQ ID NO: 1130 - protein, 23 aa, Homo sapiens
TKQMRVFSGWRYTKRSLKQCPNL

SEQ ID NO: 1131 - protein, 23 aa, Homo sapiens
VLNWRKNGSLNLRQSPKRRKSPP

SEQ ID NO: 1132 - protein, 23 aa, Homo sapiens
WNLFPRSLSLQKIMMDLNHPESI

SEQ ID NO: 1133 - protein, 23 aa, Homo sapiens
WNLSNQVPPKMLPRKSWKTGWTA

SEQ ID NO: 1134 - protein, 23 aa, Homo sapiens
WVKNLQKSQNLFCRYYFCGTSGY

SEQ ID NO: 1135 - protein, 22 aa, Homo sapiens
CCYLEIKYILFCWEKLLTTYVQ

SEQ ID NO: 1136 - protein, 22 aa, Homo sapiens
CWHLCSSSTLLSLCGRSKVSAR

SEQ ID NO: 1137 - protein, 22 aa, Homo sapiens
DFKKTLEEKHLESISNTKPLSS

SEQ ID NO: 1138 - protein, 22 aa, Homo sapiens
DGAFGLLCWGNVCTRSRWFQSR

SEQ ID NO: 1139 - protein, 22 aa, Homo sapiens
DSPLKRWWKRSCQRKPWLLESP

SEQ ID NO: 1140 - protein, 22 aa, Homo sapiens
EKVNHLSIPIHKVTVQLLATLE

SEQ ID NO: 1141 - protein, 22 aa, Homo sapiens
ELVSTGIMTFHLLSVDIYQEAT

SEQ ID NO: 1142 - skipped

SEQ ID NO: 1143 - protein, 22 aa, Homo sapiens
FILEGNTLNVLNVEKLSQGNQH

SEQ ID NO: 1144 - protein, 22 aa, Homo sapiens
FLERPLYQALNPSFMQEISKRN

SEQ ID NO: 1145 - protein, 22 aa, Homo sapiens
FQEIVTSSSLRQAFHSALTSVQ

SEQ ID NO: 1146 - protein, 22 aa, Homo sapiens
GASRDEKESARRGTQREPPILR

SEQ ID NO: 1147 - protein, 22 aa, Homo sapiens
GHAAALCLMPRSYMRMPKWQGR

SEQ ID NO: 1148 - protein, 22 aa, Homo sapiens
GKCFGRARKKGTNPNLLKYGKN

SEQ ID NO: 1149 - protein, 22 aa, Homo sapiens
HLHRMLYMNRLQPSTQWYKITA

SEQ ID NO: 1150-1151 - skipped (2 entries)

SEQ ID NO: 1152 - protein, 22 aa, Homo sapiens
IPFVRRHVSSYERPCKDTLDCG

SEQ ID NO: 1153 - protein, 22 aa, Homo sapiens
KIVMEEVTQKHRKKKVFRNRIH

SEQ ID NO: 1154 - protein, 22 aa, Homo sapiens
KVTQKTEEKQKGSHRYNSRFLE

SEQ ID NO: 1155 - protein, 22 aa, Homo sapiens
LCGNAKLSQRWVPCTSKHYLAF

SEQ ID NO: 1156 - protein, 22 aa, Homo sapiens
LGWKRVLRHHWIPRRNQLGFFQ

SEQ ID NO: 1157 - skipped

SEQ ID NO: 1158 - protein, 22 aa, Homo sapiens
LPLVFMILLRKTTKLLTQISGN

SEQ ID NO: 1159 - protein, 22 aa, Homo sapiens
LSVMELEIHVYHTLGSLQPQAL

SEQ ID NO: 1160 - protein, 22 aa, Homo sapiens
LWKKQKREKSSWQTSGRWCRRC

SEQ ID NO: 1161 - protein, 22 aa, Homo sapiens
NDYYRGFIAQPRSHLELFHFQP

SEQ ID NO: 1162 - protein, 22 aa, Homo sapiens
NERVSRSQLCSRSQAWTPPQLL

SEQ ID NO: 1163 - protein, 22 aa, Homo sapiens
NGCYSVWKNTIFNCTRSFTQFP

SEQ ID NO: 1164 - protein, 22 aa, Homo sapiens
NGQEDPAGVQNQDAELRMEIQL

SEQ ID NO: 1165 - protein, 22 aa, Homo sapiens
NHADICYTAVETEQRKIQLPAQ

SEQ ID NO: 1166 - protein, 22 aa, Homo sapiens
NKCNRKHSEELIKRHADPEGSN

SEQ ID NO: 1167 - protein, 22 aa, Homo sapiens
NRIRENKCHCKCCQNTDTGCPE

SEQ ID NO: 1168 - protein, 22 aa, Homo sapiens
NRYFLYQSSKNKYLWTAQSCLL

SEQ ID NO: 1169 - protein, 22 aa, Homo sapiens
PIPCGSGSIQRWGPMYKVYLNM

SEQ ID NO: 1170 - protein, 22 aa, Homo sapiens
PTEIGRASRKPLHCCSQKYNRN

SEQ ID NO: 1171 - skipped

SEQ ID NO: 1172 - protein, 22 aa, Homo sapiens
QHFSNSATTLPSKDPGFGHPTQ

SEQ ID NO: 1173 - protein, 22 aa, Homo sapiens
QSQQFLGVHIILICLQVAVLII

SEQ ID NO: 1174 - protein, 22 aa, Homo sapiens
RKRKKTLFNILQTLLSKKNKGH

SEQ ID NO: 1175 - protein, 22 aa, Homo sapiens
RVRLLFFMYIIMLLCLTSGGVS

SEQ ID NO: 1176 - protein, 22 aa, Homo sapiens
SAIKQRKQRTMWSGKPSLWSSG

SEQ ID NO: 1177 - protein, 22 aa, Homo sapiens
SASANYLWLRANTKTSCNSQKD

SEQ ID NO: 1178 - protein, 22 aa, Homo sapiens
SFEIQQNNFKNIIGKDYAINSI

SEQ ID NO: 1179 - protein, 22 aa, Homo sapiens
SIFKYVYTCKDPPNTTSYLKEH

SEQ ID NO: 1180 - protein, 22 aa, Homo sapiens
SNWQKRCVPQWIPRSARRRSGP

SEQ ID NO: 1181 - protein, 22 aa, Homo sapiens
SRSALKKMLLHESKGRKDGGNC

SEQ ID NO: 1182 - protein, 22 aa, Homo sapiens
SSQESLQWQTLQNMPVITFVLC

SEQ ID NO: 1183 - protein, 22 aa, Homo sapiens
SWRKFRKKQPFSRSWKIWNWVF

SEQ ID NO: 1184 - protein, 22 aa, Homo sapiens
TCNSRFKLKLTAWLMQRKGVTS

SEQ ID NO: 1185 - protein, 22 aa, Homo sapiens
TCSSKFRLKPKAWLMQRKGVTS

SEQ ID NO: 1186 - protein, 22 aa, Homo sapiens
TGKERKTCGTSKVTKERTLSSK

SEQ ID NO: 1187 - protein, 22 aa, Homo sapiens
TLERNPTNVNSVEKPLYITSLF

SEQ ID NO: 1188 - protein, 22 aa, Homo sapiens
TLKNMPWLIKIFSKIKKAGIRF

SEQ ID NO: 1189 - protein, 22 aa, Homo sapiens
TQKLKVSNQQLYKLFLKGKKRS

SEQ ID NO: 1190 - protein, 22 aa, Homo sapiens
VHHHKQCHWEEAHICHRFSQDQ

SEQ ID NO: 1191 - skipped

SEQ ID NO: 1192 - protein, 22 aa, Homo sapiens
WDAYGTAFKVFERFCIQHSGYQ

SEQ ID NO: 1193 - protein, 22 aa, Homo sapiens
WDQRKRKMGKVISKGNDLSKTG

SEQ ID NO: 1194 - protein, 22 aa, Homo sapiens
WTRSQKGKASLTIGGWRICCSL

SEQ ID NO: 1195 - protein, 22 aa, Homo sapiens
YVNMTACLLCTSAAWAQLLVKY

SEQ ID NO: 1196 - protein, 21 aa, Homo sapiens
APARYYSRNVIYSSEDSYSSR

SEQ ID NO: 1197 - skipped

SEQ ID NO: 1198 - protein, 21 aa, Homo sapiens
CPREVEPCGWHCYCTLLSPQV

SEQ ID NO: 1199 - protein, 21 aa, Homo sapiens
CTQKTQPKEYKQETEKPANNS

SEQ ID NO: 1200 - protein, 21 aa, Homo sapiens
CVMLQQDLKYTCPFQIEFPKL

SEQ ID NO: 1201 - protein, 21 aa, Homo sapiens
DCCHGNSRCRSSFGLSLGKPF

SEQ ID NO: 1202 - protein, 21 aa, Homo sapiens
DDFGSHQILITKMTTSRLAVR

SEQ ID NO: 1203 - protein, 21 aa, Homo sapiens
ERFGQTSSIRVWRICHQAHLG

SEQ ID NO: 1204 - protein, 21 aa, Homo sapiens
GLPAPSVLLSWRWMKLNLGQL

SEQ ID NO: 1205 - protein, 21 aa, Homo sapiens
HIITTNLNAPKDLVWLYSVRI

SEQ ID NO: 1206 - protein, 21 aa, Homo sapiens
HKGGRGPSQTESRKKHRSWER

SEQ ID NO: 1207 - protein, 21 aa, Homo sapiens
HLLLRRMCVAPITQVITSSNL

SEQ ID NO: 1208 - protein, 21 aa, Homo sapiens
HRDCFSKISNLQKIKLEKQAS

SEQ ID NO: 1209 - protein, 21 aa, Homo sapiens
ICNSDITLYVYRRGGPLCFAL

SEQ ID NO: 1210 - protein, 21 aa, Homo sapiens
KGMGAEESRSPARRRSLFFRL

SEQ ID NO: 1211 - protein, 21 aa, Homo sapiens
KLFLVREVQRGEKQELRRIKQ

SEQ ID NO: 1212 - protein, 21 aa, Homo sapiens
KLKALSFFSAEEQTQISETST

SEQ ID NO: 1213 - protein, 21 aa, Homo sapiens
KLLQKFYGNKTQESLCRKEAF

SEQ ID NO: 1214 - protein, 21 aa, Homo sapiens
KPNLSHTSYLHGEHSPVPLDC

SEQ ID NO: 1215 - protein, 21 aa, Homo sapiens
KPVSTFYLYTSFDEARTQRRD

SEQ ID NO: 1216 - protein, 21 aa, Homo sapiens
KRKKEKEKEEILSVFIFFIKL

SEQ ID NO: 1217 - protein, 21 aa, Homo sapiens
LGTRIQDLDIMRRRRCGQTPT

SEQ ID NO: 1218 - protein, 21 aa, Homo sapiens
LKSQLMPEGKPKCYKMKQKLF

SEQ ID NO: 1219 - protein, 21 aa, Homo sapiens
LSGCLTGQCSQFSHVCCKYDV

SEQ ID NO: 1220 - protein, 21 aa, Homo sapiens
LVSFIFRLIICSLNITEHEKL

SEQ ID NO: 1221 - protein, 21 aa, Homo sapiens
MPVVSSTDDPLAVQFLASLTC

SEQ ID NO: 1222 - protein, 21 aa, Homo sapiens
MQEWKRYLEASLKTPVSCVES

SEQ ID NO: 1223 - protein, 21 aa, Homo sapiens
NERDYILLGFYPSEIRITSAR

SEQ ID NO: 1224 - protein, 21 aa, Homo sapiens
NGEEGKTEAQYGGTEEGSGHG

SEQ ID NO: 1225 - protein, 21 aa, Homo sapiens
NGFLPECKRQQSIRTQLLVPK

SEQ ID NO: 1226 - protein, 21 aa, Homo sapiens
NHQDHQSGKEKAVHRRADLLS

SEQ ID NO: 1227 - protein, 21 aa, Homo sapiens
NIYGIQSLHLLAVQSVSPFTS

SEQ ID NO: 1228 - protein, 21 aa, Homo sapiens
NKNNSKLYFTRRIRHTFFRGI

SEQ ID NO: 1229 - protein, 21 aa, Homo sapiens
NPCQRSSAGAYGRDRKFEETT

SEQ ID NO: 1230 - protein, 21 aa, Homo sapiens
NPEQYPGDAGADEPDSVCGGL

SEQ ID NO: 1231 - protein, 21 aa, Homo sapiens
NPIQTSIRSFPGVAPQIPRIS

SEQ ID NO: 1232 - protein, 21 aa, Homo sapiens
NRCGLQLAQKLPESPHNYPSD

SEQ ID NO: 1233 - protein, 21 aa, Homo sapiens
NRIEPPASMLGQIKRENSCTD

SEQ ID NO: 1234 - protein, 21 aa, Homo sapiens
NRSSGPLSLQEIHFKTCYQIY

SEQ ID NO: 1235 - protein, 21 aa, Homo sapiens
NYEEEKILSHSETNVIPSGNL

SEQ ID NO: 1236 - protein, 21 aa, Homo sapiens
PLHPGSQEKSSDRGANSDHIY

SEQ ID NO: 1237 - protein, 21 aa, Homo sapiens
PYTTGASNSTNREAEESVRKS

SEQ ID NO: 1238 - protein, 21 aa, Homo sapiens
QDGWGVGSSAISGTPFERKGY

SEQ ID NO: 1239 - protein, 21 aa, Homo sapiens
QRHSVRPRIRRTLSPVKNVAG

SEQ ID NO: 1240 - protein, 21 aa, Homo sapiens
QRMQLPLLMWTTSQVRNCNNI

SEQ ID NO: 1241 - protein, 21 aa, Homo sapiens
QTFCLIIPLYCKNQKTTKVLS

SEQ ID NO: 1242 - protein, 21 aa, Homo sapiens
RFKERQGYRERKRRKARCKER

SEQ ID NO: 1243 - protein, 21 aa, Homo sapiens
RMERVKKLKRQSLKNLSWKKY

SEQ ID NO: 1244 - protein, 21 aa, Homo sapiens
RTALITHTLCCWLTWAQVSAF

SEQ ID NO: 1245 - protein, 21 aa, Homo sapiens
RTNCYQCCGSFAAEQGPGGHE

SEQ ID NO: 1246 - protein, 21 aa, Homo sapiens
RYPPAYGPDGKPRPRFNNVQL

SEQ ID NO: 1247 - protein, 21 aa, Homo sapiens
SGRYKDEWSSPVIEYCLCCKG

SEQ ID NO: 1248 - protein, 21 aa, Homo sapiens
SKRQTTKWSLQQMEFCGQIKD

SEQ ID NO: 1249 - protein, 21 aa, Homo sapiens
SMIENRPDTRRLASTLDTLIM

SEQ ID NO: 1250 - protein, 21 aa, Homo sapiens
SQIPWRLGTRPTCLRSLSHSL

SEQ ID NO: 1251 - protein, 21 aa, Homo sapiens
SRISGSKLAAIDPSPLTIYST

SEQ ID NO: 1252 - protein, 21 aa, Homo sapiens
SRLIQFLYCVERKWKTQGGIT

SEQ ID NO: 1253 - protein, 21 aa, Homo sapiens
SSECRGFLSYVQILHLTESRR

SEQ ID NO: 1254 - skipped

SEQ ID NO: 1255 - protein, 21 aa, Homo sapiens
TKTVSEGISFDISEKISNHGE

SEQ ID NO: 1256 - protein, 21 aa, Homo sapiens
TSIQLVCLWNTFPFTWEFFNP

SEQ ID NO: 1257 - protein, 21 aa, Homo sapiens
TSLFIKWLTYKLCQYLLERCN

SEQ ID NO: 1258 - protein, 21 aa, Homo sapiens
VAAVAAATLGSRVPSTQTQLH

SEQ ID NO: 1259 - protein, 21 aa, Homo sapiens
VLNCFLWSLNGKILSSRKSKI

SEQ ID NO: 1260 - skipped

SEQ ID NO: 1261 - protein, 21 aa, Homo sapiens
VSAAYYFLNKLQIFCKSVMIL

SEQ ID NO: 1262 - protein, 21 aa, Homo sapiens
VVEGGGYLSPIQLRFPKENLL

SEQ ID NO: 1263 - protein, 21 aa, Homo sapiens
VVKVWMRVKYTKEVIMDLTNV

SEQ ID NO: 1264 - protein, 21 aa, Homo sapiens
WPRGSSRCTKPRRGAQDGNPT

SEQ ID NO: 1265 - protein, 21 aa, Homo sapiens
YKMMLVFAFSLSQMMGQHPKG

SEQ ID NO: 1266 - protein, 21 aa, Homo sapiens
YSLSKASAENFLSCGRPSEGC

SEQ ID NO: 1267 - protein, 21 aa, Homo sapiens
YSYPSSLSVFSVPGYHLYYFR

SEQ ID NO: 1268 - protein, 20 aa, Homo sapiens
ADPHLSSPPLMMNKSRSSQE

SEQ ID NO: 1269 - protein, 20 aa, Homo sapiens
AFHHTVRKQTLNFHFWTRGI

SEQ ID NO: 1270 - protein, 20 aa, Homo sapiens
AKPRNLLLKRRRKIIAATAM

SEQ ID NO: 1271 - skipped

SEQ ID NO: 1272 - protein, 20 aa, Homo sapiens
CMRNLDNLLGKMQKKITGMG

SEQ ID NO: 1273 - protein, 20 aa, Homo sapiens
CWILMRQSLFVGTFMDNSLI

SEQ ID NO: 1274 - protein, 20 aa, Homo sapiens
DILRHMAQTANQDPASIMFN

SEQ ID NO: 1275 - protein, 20 aa, Homo sapiens
DSLKVLLVFQLVQCLVQRWL

SEQ ID NO: 1276 - protein, 20 aa, Homo sapiens
DVHQKQRRKRLPSQNVCLHQ

SEQ ID NO: 1277 - protein, 20 aa, Homo sapiens
EDMLDWDCLHHHLYPVIQQG

SEQ ID NO: 1278 - protein, 20 aa, Homo sapiens
ETTESTSRCHCYRTTKCEME

SEQ ID NO: 1279 - protein, 20 aa, Homo sapiens
ETTRRSQLLSRREEKSAGNG

SEQ ID NO: 1280 - protein, 20 aa, Homo sapiens
FCSIMTNKIRSNPIHLWYWT

SEQ ID NO: 1281 - protein, 20 aa, Homo sapiens
GISLVLIQHYQCYRTPLFML

SEQ ID NO: 1282 - protein, 20 aa, Homo sapiens
GNTANGPGIGRKSLMPMQVT

SEQ ID NO: 1283 - protein, 20 aa, Homo sapiens
GVTAMHFIIPVLYDYKRVIL

SEQ ID NO: 1284 - protein, 20 aa, Homo sapiens
GVTRTLNMSTKTPEEASGVS

SEQ ID NO: 1285 - skipped

SEQ ID NO: 1286 - protein, 20 aa, Homo sapiens
IEKEVRRRIVMFQGELPLCS

SEQ ID NO: 1287 - protein, 20 aa, Homo sapiens
IFSTRMRRHVGTQTRAPPSG

SEQ ID NO: 1288 - protein, 20 aa, Homo sapiens
IKPFSTNSVLRRTGSSIEEL

SEQ ID NO: 1289 - protein, 20 aa, Homo sapiens
IQAALDIACCRPAFRHAEWR

SEQ ID NO: 1290 - protein, 20 aa, Homo sapiens
ISSSVNDQPPCTKFIWNTKR

SEQ ID NO: 1291 - protein, 20 aa, Homo sapiens
IVLPHLPTQPNACTGTSLRN

SEQ ID NO: 1292 - protein, 20 aa, Homo sapiens
KAKGKTESPRSQSDQAVRVI

SEQ ID NO: 1293 - protein, 20 aa, Homo sapiens
KCIKCSPVIRLGTFISSKKI

SEQ ID NO: 1294 - protein, 20 aa, Homo sapiens
KRKNKIERVAILIWKALMKI

SEQ ID NO: 1295 - protein, 20 aa, Homo sapiens
KRRCHSLGIIQKDGDAQEAC

SEQ ID NO: 1296 - protein, 20 aa, Homo sapiens
KTYLRKELQDDQEEKGFTIN

SEQ ID NO: 1297 - protein, 20 aa, Homo sapiens
KYKKFKELLMQKMKGLASYL

SEQ ID NO: 1298 - protein, 20 aa, Homo sapiens
LASMFVLDSSLPMWKKQSQC

SEQ ID NO: 1299 - protein, 20 aa, Homo sapiens
LFHLKGRRQQLKATKEYRSF

SEQ ID NO: 1300 - protein, 20 aa, Homo sapiens
LGKNRRNLHLRKMNHILLMC

SEQ ID NO: 1301 - protein, 20 aa, Homo sapiens
LICHQIKISLFLKVTMMMLC

SEQ ID NO: 1302 - protein, 20 aa, Homo sapiens
LQDLRLVLRFGKAFALSPNS

SEQ ID NO: 1303 - protein, 20 aa, Homo sapiens
LQILKLILKRARLLEGVWWM

SEQ ID NO: 1304 - protein, 20 aa, Homo sapiens
LSSKKKSCFMLEKTENKIVW

SEQ ID NO: 1305 - protein, 20 aa, Homo sapiens
NCAEGGKTVLWDRWCRSKLH

SEQ ID NO: 1306 - protein, 20 aa, Homo sapiens
NEDSENDWSINIVSILRLAG

SEQ ID NO: 1307 - protein, 20 aa, Homo sapiens
NHGKFWYPNGFKKWQFTVTH

SEQ ID NO: 1308 - protein, 20 aa, Homo sapiens
NHIFDMNLLDMIEVGGNTGS

SEQ ID NO: 1309 - protein, 20 aa, Homo sapiens
NKEDFSVQKSPLNKSKDCQE

SEQ ID NO: 1310 - protein, 20 aa, Homo sapiens
NSSLLRRAWPMLSFPSNRCS

SEQ ID NO: 1311 - protein, 20 aa, Homo sapiens
NTCITSYSYSEPFLFSTALF

SEQ ID NO: 1312 - protein, 20 aa, Homo sapiens
NTETTGCHNYFKRQDHDTQP

SEQ ID NO: 1313 - skipped

SEQ ID NO: 1314 - protein, 20 aa, Homo sapiens
PLKLRRQQQPQPHLRTLSNT

SEQ ID NO: 1315 - protein, 20 aa, Homo sapiens
PPQPMGPPPECCSSWLRRIE

SEQ ID NO: 1316 - protein, 20 aa, Homo sapiens
PSAMCQLQDCFQICTNPVIS

SEQ ID NO: 1317 - protein, 20 aa, Homo sapiens
PSQEREVQGRRGKDWEEASV

SEQ ID NO: 1318 - protein, 20 aa, Homo sapiens
QDSRKQVPLQMLPKYRHWMP

SEQ ID NO: 1319 - protein, 20 aa, Homo sapiens
QNSYRTSQKRRGHWPVKFVT

SEQ ID NO: 1320 - skipped

SEQ ID NO: 1321 - protein, 20 aa, Homo sapiens
QVNYQSVKLQAFSKLIFRMV

SEQ ID NO: 1322 - protein, 20 aa, Homo sapiens
RETSQKGKKEEKKGKAFFYT

SEQ ID NO: 1323 - protein, 20 aa, Homo sapiens
RFRNSTRLPLLFRSIVKPLK

SEQ ID NO: 1324 - protein, 20 aa, Homo sapiens
RGVSGQIGNTCCRAFSGEDT

SEQ ID NO: 1325 - protein, 20 aa, Homo sapiens
RKGTSKAVAKEKLGSLKKHT

SEQ ID NO: 1326 - protein, 20 aa, Homo sapiens
RKRSLSTSSAGAYRSSEIKK

SEQ ID NO: 1327 - protein, 20 aa, Homo sapiens
SCGGTRKTRKRCSRRSRKRG

SEQ ID NO: 1328 - protein, 20 aa, Homo sapiens
SKCSTYTIRNIQKAGSRSSC

SEQ ID NO: 1329 - protein, 20 aa, Homo sapiens
SKLQMIWAFYLKMMYHIFWG

SEQ ID NO: 1330 - protein, 20 aa, Homo sapiens
SKRRKAIVTAQTIALIVIHH

SEQ ID NO: 1331 - protein, 20 aa, Homo sapiens
SLRWVGRSWIFTVSTPESLL

SEQ ID NO: 1332 - protein, 20 aa, Homo sapiens
SLSLPRWCATGSTRTCLPRP

SEQ ID NO: 1333 - protein, 20 aa, Homo sapiens
SPQWVVHFHEDAAVHILPLE

SEQ ID NO: 1334 - protein, 20 aa, Homo sapiens
SQILTSYIFGKQTAFLFASG

SEQ ID NO: 1335 - protein, 20 aa, Homo sapiens
SQKGASWFAFFCICTIPKFR

SEQ ID NO: 1336 - protein, 20 aa, Homo sapiens
SQSIWKRRCENELHRSDLYW

SEQ ID NO: 1337 - protein, 20 aa, Homo sapiens
SREKALNSIYHSKKVMGFIK

SEQ ID NO: 1338 - protein, 20 aa, Homo sapiens
SSHCTAFFWCRGFRKIFGRH

SEQ ID NO: 1339 - protein, 20 aa, Homo sapiens
SSWQVLFMNIQEDILSLLSQ

SEQ ID NO: 1340 - protein, 20 aa, Homo sapiens
SWLKKNRGSCRSWRRMRGSS

SEQ ID NO: 1341 - protein, 20 aa, Homo sapiens
TFLNNLIRFLSLNQYGKILV

SEQ ID NO: 1342 - protein, 20 aa, Homo sapiens
TFQMYRMWQSFQPVLNPCYT

SEQ ID NO: 1343 - protein, 20 aa, Homo sapiens
TFRCYKIITWIIFLSQKKMF

SEQ ID NO: 1344 - protein, 20 aa, Homo sapiens
TMLALLNPSQGGFCLLNFHL

SEQ ID NO: 1345 - protein, 20 aa, Homo sapiens
TRELQEKRGRNQTMVRESFS

SEQ ID NO: 1346 - protein, 20 aa, Homo sapiens
TRVLYEFLQPGSQRVLPVCL

SEQ ID NO: 1347 - protein, 20 aa, Homo sapiens
VPRRCLSRQTNRTCQRYAIT

SEQ ID NO: 1348 - protein, 20 aa, Homo sapiens
VTPMVGPFISEPSLSSSQKL

SEQ ID NO: 1349 - protein, 20 aa, Homo sapiens
VTRRRSIRQTQISVTLGRSL

SEQ ID NO: 1350 - protein, 20 aa, Homo sapiens
YRRASYPSTKFLLEKNSRRP

SEQ ID NO: 1351 - protein, 19 aa, Homo sapiens
ATAPRANQTTVPESITGPL

SEQ ID NO: 1352 - protein, 19 aa, Homo sapiens
ATSMTHQDLKSASHTKSPN

SEQ ID NO: 1353 - protein, 19 aa, Homo sapiens
AVMHNIRISKLEMKRISTS

SEQ ID NO: 1354 - protein, 19 aa, Homo sapiens
CLQACNLSQILRLALQLCL

SEQ ID NO: 1355 - skipped

SEQ ID NO: 1356 - protein, 19 aa, Homo sapiens
DFHERLCSRIIQKISYLHM

SEQ ID NO: 1357 - protein, 19 aa, Homo sapiens
DFRNMNMFYIQELQALLLW

SEQ ID NO: 1358 - protein, 19 aa, Homo sapiens
EKHKINSPRNLLLNESHLP

SEQ ID NO: 1359 - protein, 19 aa, Homo sapiens
EMKKKKKPVALRKNLYLKN

SEQ ID NO: 1360 - protein, 19 aa, Homo sapiens
ETIYLRQLSQFLSNPAMKS

SEQ ID NO: 1361 - protein, 19 aa, Homo sapiens
EVKKNPSLNGNALIQKKEL

SEQ ID NO: 1362 - protein, 19 aa, Homo sapiens
FHQQLNSAAPQLRKWLKRF

SEQ ID NO: 1363 - protein, 19 aa, Homo sapiens
FIRKLRIIQLVIRKQLLKS

SEQ ID NO: 1364 - protein, 19 aa, Homo sapiens
FLHLTRKDGSKLPLLFYLE

SEQ ID NO: 1365 - protein, 19 aa, Homo sapiens
FLVSRTSLNKSYSYSRSHC

SEQ ID NO: 1366 - skipped

SEQ ID NO: 1367 - protein, 19 aa, Homo sapiens
GRRRPRGLARGTINIRVRA

SEQ ID NO: 1368 - protein, 19 aa, Homo sapiens
HIIQDWWTKIVSLMQLLSN

SEQ ID NO: 1369 - protein, 19 aa, Homo sapiens
IIIRICTTFEKSGGGTRGG

SEQ ID NO: 1370 - protein, 19 aa, Homo sapiens
IPKGKPQSGLCSRWNFVAR

SEQ ID NO: 1371 - protein, 19 aa, Homo sapiens
ISLTSFLTGWMMYLHIQKL

SEQ ID NO: 1372 - protein, 19 aa, Homo sapiens
KENIFVSIAIEHVQSLVCF

SEQ ID NO: 1373 - protein, 19 aa, Homo sapiens
KFSRCRLSTAATEPRGLCQ

SEQ ID NO: 1374 - protein, 19 aa, Homo sapiens
KISNKITFSQVPFVIQVQV

SEQ ID NO: 1375 - protein, 19 aa, Homo sapiens
KLANMQNIPLQVYLCQNQI

SEQ ID NO: 1376 - protein, 19 aa, Homo sapiens
KRSAWGFEILEKGNEHEVQ

SEQ ID NO: 1377 - protein, 19 aa, Homo sapiens
KSANQGVYLVQQRLGHPRH

SEQ ID NO: 1378 - protein, 19 aa, Homo sapiens
KSFPRVQWHAQDKQIGIWK

SEQ ID NO: 1379 - protein, 19 aa, Homo sapiens
KSGFWKSLLISFIFSEVRR

SEQ ID NO: 1380 - protein, 19 aa, Homo sapiens
LASLQNQKKNKKKLQTHLK

SEQ ID NO: 1381 - protein, 19 aa, Homo sapiens
LGIRAGSLMLICKSLTEQF

SEQ ID NO: 1382 - protein, 19 aa, Homo sapiens
LKKNSLGIIWPKSGLILTA

SEQ ID NO: 1383 - protein, 19 aa, Homo sapiens
LKNFCRVLYILSKCSSTLL

SEQ ID NO: 1384 - protein, 19 aa, Homo sapiens
LLYKLKLEQRGRLLVLLGL

SEQ ID NO: 1385 - skipped

SEQ ID NO: 1386 - protein, 19 aa, Homo sapiens
LSFCNQHVEDSEQDKDLKL

SEQ ID NO: 1387 - protein, 19 aa, Homo sapiens
LSKKKVIPSRKMSNPLKLR

SEQ ID NO: 1388 - protein, 19 aa, Homo sapiens
LTMTPESIQVPNVEMKRMN

SEQ ID NO: 1389 - protein, 19 aa, Homo sapiens
LTWSKWRNPFSPWKLPCIS

SEQ ID NO: 1390 - protein, 19 aa, Homo sapiens
MEPSTKPTTSGFCVHGRAE

SEQ ID NO: 1391 - protein, 19 aa, Homo sapiens
MFNPFRGFAKKLQTSYYFE

SEQ ID NO: 1392 - protein, 19 aa, Homo sapiens
MKKTPNLQTMRTIRRTGNY

SEQ ID NO: 1393 - protein, 19 aa, Homo sapiens
MPFLVKLISNRKCRNSITK

SEQ ID NO: 1394 - protein, 19 aa, Homo sapiens
MRIKIMLTLLAHRLLLTQT

SEQ ID NO: 1395 - protein, 19 aa, Homo sapiens
NAKASLYLRWTACPGWAPQ

SEQ ID NO: 1396 - protein, 19 aa, Homo sapiens
NEKHEIRKDIGITSTKSLS

SEQ ID NO: 1397 - protein, 19 aa, Homo sapiens
NGKYSEVGELYLEITSCVE

SEQ ID NO: 1398 - protein, 19 aa, Homo sapiens
NITGSNFSTNFQALNSFFE

SEQ ID NO: 1399 - protein, 19 aa, Homo sapiens
NKGSPNETNERRTRESQTD

SEQ ID NO: 1400 - protein, 19 aa, Homo sapiens
NKRLNGDRRKSQGSNNCIL

SEQ ID NO: 1401 - protein, 19 aa, Homo sapiens
NQEKLKEVSYTTPHFASCS

SEQ ID NO: 1402 - protein, 19 aa, Homo sapiens
NQQDRNRQLSKPLLRNTKK

SEQ ID NO: 1403 - protein, 19 aa, Homo sapiens
NSREDKRERTATEEKARRN

SEQ ID NO: 1404 - protein, 19 aa, Homo sapiens
NSSFATHCCQQRTIRGACR

SEQ ID NO: 1405 - protein, 19 aa, Homo sapiens
NTGSIGENGRYNSSTNQIQ

SEQ ID NO: 1406 - protein, 19 aa, Homo sapiens
PYQHCLNNSTLPFESKSNG

SEQ ID NO: 1407 - protein, 19 aa, Homo sapiens
QAHFGITHPENGLLSSTSQ

SEQ ID NO: 1408 - protein, 19 aa, Homo sapiens
QCISLLTLTLGCSPPITTT

SEQ ID NO: 1409 - protein, 19 aa, Homo sapiens
QDTLRNLLLQTTLTCWWIH

SEQ ID NO: 1410 - protein, 19 aa, Homo sapiens
QEYADMIESLRLMKLFDSV

SEQ ID NO: 1411 - protein, 19 aa, Homo sapiens
QKLKSTGMLQAVLQITHSF

SEQ ID NO: 1412 - protein, 19 aa, Homo sapiens
QKQPNFCIPGGSSEKSVTF

SEQ ID NO: 1413 - protein, 19 aa, Homo sapiens
QRQYWFSPFGQENKSRAII

SEQ ID NO: 1414 - protein, 19 aa, Homo sapiens
QSWAEFLRKPDLLSLSQSQ

SEQ ID NO: 1415 - protein, 19 aa, Homo sapiens
QVWITTGSETTRIPTQLSQ

SEQ ID NO: 1416 - protein, 19 aa, Homo sapiens
RDSIQFRAEVDGGEMQSED

SEQ ID NO: 1417 - protein, 19 aa, Homo sapiens
REKRKSILLHLIVLNSPES

SEQ ID NO: 1418 - protein, 19 aa, Homo sapiens
RFREVEKKRKEEEKKATET

SEQ ID NO: 1419 - protein, 19 aa, Homo sapiens
RMISKSLTVKGLMELYHLR

SEQ ID NO: 1420 - protein, 19 aa, Homo sapiens
RQRKKRKEEESKKGLNQRF

SEQ ID NO: 1421 - protein, 19 aa, Homo sapiens
RQRYFKRKRYTKSEYYFGL

SEQ ID NO: 1422 - protein, 19 aa, Homo sapiens
RRGKSERGGRGYGGTKICW

SEQ ID NO: 1423 - protein, 19 aa, Homo sapiens
RRHRSQMHRTGENWKRFQL

SEQ ID NO: 1424 - protein, 19 aa, Homo sapiens
RYMLLSKAICVPFNTFQCF

SEQ ID NO: 1425 - skipped

SEQ ID NO: 1426 - protein, 19 aa, Homo sapiens
SKIKGGRFQAAHSSHSSDL

SEQ ID NO: 1427 - protein, 19 aa, Homo sapiens
SKTNSRLIGKKMKTDSSKA

SEQ ID NO: 1428 - protein, 19 aa, Homo sapiens
SQFRFGKLKSSKKGRKFSS

SEQ ID NO: 1429 - protein, 19 aa, Homo sapiens
SRKFKSQRIYDSGWPFWIL

SEQ ID NO: 1430 - protein, 19 aa, Homo sapiens
SRWKKIMKFLLALNKIMMR

SEQ ID NO: 1431 - protein, 19 aa, Homo sapiens
TGFSGKPSPERMAKLGRLP

SEQ ID NO: 1432 - protein, 19 aa, Homo sapiens
THPLLQACSPSACRCPCHQ

SEQ ID NO: 1433 - protein, 19 aa, Homo sapiens
TVEKIHPNVKTVGSATRGA

SEQ ID NO: 1434 - protein, 19 aa, Homo sapiens
VLTNLWNLNGWKDKKKYLG

SEQ ID NO: 1435 - protein, 19 aa, Homo sapiens
VPEQKPWPGQRVFKRGLLR

SEQ ID NO: 1436 - protein, 19 aa, Homo sapiens
VQDLVTNVLPLEVTVLLGR

SEQ ID NO: 1437 - protein, 19 aa, Homo sapiens
VTTSVWDGPARTNASNSAG

SEQ ID NO: 1438 - protein, 19 aa, Homo sapiens
WRRQSLISRISHFQKLRHI

SEQ ID NO: 1439 - protein, 19 aa, Homo sapiens
YHGPVCGEESTEALSLFPQ

SEQ ID NO: 1440 - protein, 19 aa, Homo sapiens
YKSLPRTAVYYPGRQGSGL

SEQ ID NO: 1441 - protein, 19 aa, Homo sapiens
YSSLKGNYPAGERVCSNII

SEQ ID NO: 1442 - protein, 19 aa, Homo sapiens
YSSLKGNYPARERVCSNII

SEQ ID NO: 1443 - protein, 19 aa, Homo sapiens
YTTFFREATNDGSIRSTKK

SEQ ID NO: 1444 - skipped

SEQ ID NO: 1445 - protein, 18 aa, Homo sapiens
AASSWLWASSYLGPSRWD

SEQ ID NO: 1446 - protein, 18 aa, Homo sapiens
ASELRTMLKATGRNSVRN

SEQ ID NO: 1447 - protein, 18 aa, Homo sapiens
CFRKRKEAARTTEAIGGQ

SEQ ID NO: 1448 - protein, 18 aa, Homo sapiens
CISFNTVLLVSLQNPVKK

SEQ ID NO: 1449 - protein, 18 aa, Homo sapiens
CLCYFCTAIEMTTTESYF

SEQ ID NO: 1450 - protein, 18 aa, Homo sapiens
DVMQIHLKAHQQQKVKKA

SEQ ID NO: 1451 - protein, 18 aa, Homo sapiens
EELRQCISSSQCCTITRE

SEQ ID NO: 1452 - protein, 18 aa, Homo sapiens
EILAEYCVVGAVHAVAQN

SEQ ID NO: 1453 - protein, 18 aa, Homo sapiens
ESFGFGKENRISNFSGVW

SEQ ID NO: 1454 - skipped

SEQ ID NO: 1455 - protein, 18 aa, Homo sapiens
FLEKNPMSLLMTGGKRLP

SEQ ID NO: 1456 - protein, 18 aa, Homo sapiens
FLKKIYGRNFISAVCIGH

SEQ ID NO: 1457 - protein, 18 aa, Homo sapiens
FLLTVNGNVSIHPTKSQL

SEQ ID NO: 1458 - protein, 18 aa, Homo sapiens
GKRVAQRLYLKVFLAHHH

SEQ ID NO: 1459 - protein, 18 aa, Homo sapiens
GTAIRTSAEPARTAGLYP

SEQ ID NO: 1460 - protein, 18 aa, Homo sapiens
HFWNSTKKRLRTMKIKCS

SEQ ID NO: 1461 - protein, 18 aa, Homo sapiens
HILQKTSQVRATILLLIT

SEQ ID NO: 1462 - protein, 18 aa, Homo sapiens
HKWLKFCLLRVVKESFHE

SEQ ID NO: 1463 - protein, 18 aa, Homo sapiens
HNGYVLQKKLHFTFYTCL

SEQ ID NO: 1464 - protein, 18 aa, Homo sapiens
HNLSHLKTSLRLNKANRN

SEQ ID NO: 1465 - protein, 18 aa, Homo sapiens
HQRKEILYTDSTRQPGKL

SEQ ID NO: 1466 - protein, 18 aa, Homo sapiens
HRSHGRSCYYTPISSGKL

SEQ ID NO: 1467 - protein, 18 aa, Homo sapiens
IAEDLINLTMGDLIALVT

SEQ ID NO: 1468 - protein, 18 aa, Homo sapiens
ILFQNPDSKMWRHCKVSE

SEQ ID NO: 1469 - protein, 18 aa, Homo sapiens
IPKMWRMWQNLYPVLTLY

SEQ ID NO: 1470 - protein, 18 aa, Homo sapiens
IVLLSQHFHCLLVKNLKL

SEQ ID NO: 1471 - protein, 18 aa, Homo sapiens
IWQVCKIKRKTRKNYRHI

SEQ ID NO: 1472 - protein, 18 aa, Homo sapiens
KAKEKKLQEFRCYQCETV

SEQ ID NO: 1473 - protein, 18 aa, Homo sapiens
KIPILGRMKKFQIVLRLV

SEQ ID NO: 1474 - protein, 18 aa, Homo sapiens
KKNGKSLHKNRWPGCCSS

SEQ ID NO: 1475 - protein, 18 aa, Homo sapiens
KNSKTLGCSGSSHLATIS

SEQ ID NO: 1476 - protein, 18 aa, Homo sapiens
KQESSHEWYSPCRRHGRY

SEQ ID NO: 1477 - protein, 18 aa, Homo sapiens
KRGISSRTGHFESKFSPT

SEQ ID NO: 1478 - protein, 18 aa, Homo sapiens
KRPLCITELSVHILHDYM

SEQ ID NO: 1479 - protein, 18 aa, Homo sapiens
KTKEEEEQRAFCSRGTGT

SEQ ID NO: 1480 - protein, 18 aa, Homo sapiens
KTKNQWLASVSLRTASVQ

SEQ ID NO: 1481 - protein, 18 aa, Homo sapiens
KVKSSVLQLKLLKKKMRI

SEQ ID NO: 1482 - protein, 18 aa, Homo sapiens
LFPQRKLSSKRKSVFKHH

SEQ ID NO: 1483 - protein, 18 aa, Homo sapiens
LFPQRKLSSRRKSVFKHH

SEQ ID NO: 1484 - protein, 18 aa, Homo sapiens
LKAPMTYLTGTGQVGGKE

SEQ ID NO: 1485 - protein, 18 aa, Homo sapiens
LKVFSFFTLHGGAWLLRL

SEQ ID NO: 1486 - protein, 18 aa, Homo sapiens
LMWRREQRSGCRCWIQMT

SEQ ID NO: 1487 - skipped

SEQ ID NO: 1488 - protein, 18 aa, Homo sapiens
LQFCKQRVKKIMKSGSVQ

SEQ ID NO: 1489 - skipped

SEQ ID NO: 1490 - protein, 18 aa, Homo sapiens
NCSFPAFYRKLKFSLQFI

SEQ ID NO: 1491 - protein, 18 aa, Homo sapiens
NDNGHSCKWKNDKQGANS

SEQ ID NO: 1492 - skipped

SEQ ID NO: 1493 - protein, 18 aa, Homo sapiens
NKEISRFRMHSCPLYGPW

SEQ ID NO: 1494 - protein, 18 aa, Homo sapiens
NKVFAVWGPLSFLLQLQG

SEQ ID NO: 1495 - protein, 18 aa, Homo sapiens
NLSSVQAKSCSFSRRFRL

SEQ ID NO: 1496 - protein, 18 aa, Homo sapiens
NMQCSRVCGNQTNYRCSK

SEQ ID NO: 1497 - protein, 18 aa, Homo sapiens
NPRNAEVPWVGGDREARH

SEQ ID NO: 1498 - protein, 18 aa, Homo sapiens
NPWNRFIWKSHVGKTQSH

SEQ ID NO: 1499 - protein, 18 aa, Homo sapiens
NQGGYRGGGKQSFMCNDR

SEQ ID NO: 1500 - protein, 18 aa, Homo sapiens
NRKEQKIEVQAGQTSRLI

SEQ ID NO: 1501 - protein, 18 aa, Homo sapiens
NWRTRSGPDGEHIPRTDH

SEQ ID NO: 1502 - protein, 18 aa, Homo sapiens
NYQEKQWTINENNYPQNK

SEQ ID NO: 1503 - protein, 18 aa, Homo sapiens
PALPALSQGVYTSDRTDK

SEQ ID NO: 1504-1505 - skipped (2 entries)

SEQ ID NO: 1506 - protein, 18 aa, Homo sapiens
QDLPLSSICQTNVTIYWQ

SEQ ID NO: 1507 - protein, 18 aa, Homo sapiens
QFNLTMKEAGRFYGSSFI

SEQ ID NO: 1508 - protein, 18 aa, Homo sapiens
RFREVEKKRKEEEKKCGW

SEQ ID NO: 1509 - protein, 18 aa, Homo sapiens
RKKSTIYQSRFTRSLSSY

SEQ ID NO: 1510 - protein, 18 aa, Homo sapiens
RNLRRFRGNEHKLSSYFC

SEQ ID NO: 1511 - protein, 18 aa, Homo sapiens
RPITKKYSCPRVITEKSL

SEQ ID NO: 1512 - protein, 18 aa, Homo sapiens
RRKSRENGTRIGGTNQRT

SEQ ID NO: 1513 - protein, 18 aa, Homo sapiens
RRQIFLYQVVLQVTFFPS

SEQ ID NO: 1514 - protein, 18 aa, Homo sapiens
SERSSTVTWMWSIGTSKL

SEQ ID NO: 1515 - protein, 18 aa, Homo sapiens
SIHCRRRNQNWLQRKKYS

SEQ ID NO: 1516 - protein, 18 aa, Homo sapiens
SLSFPFRKQHPEEAKALR

SEQ ID NO: 1517 - protein, 18 aa, Homo sapiens
SSYVRCSRVSKSDSSNHL

SEQ ID NO: 1518 - protein, 18 aa, Homo sapiens
STLKVMFLLLCQEAVLCV

SEQ ID NO: 1519 - protein, 18 aa, Homo sapiens
STTNQHSTAIREFIGEAI

SEQ ID NO: 1520 - protein, 18 aa, Homo sapiens
SVRMTSAWYPGMWRRQTR

SEQ ID NO: 1521 - protein, 18 aa, Homo sapiens
TAFIWKIWPQTAELLLTS

SEQ ID NO: 1522 - protein, 18 aa, Homo sapiens
TCFPPEEWKVTAQPIPGG

SEQ ID NO: 1523 - skipped

SEQ ID NO: 1524 - protein, 17 aa, Homo sapiens
AFLMWGVWFNFLHLFSL

SEQ ID NO: 1525 - protein, 17 aa, Homo sapiens
AWKLTSRSPFFVWQLMM

SEQ ID NO: 1526 - skipped

SEQ ID NO: 1527 - protein, 17 aa, Homo sapiens
CLGKIRLSIKYIFILKN

SEQ ID NO: 1528 - protein, 17 aa, Homo sapiens
CRWFQTSPFSPCLLCTS

SEQ ID NO: 1529 - protein, 17 aa, Homo sapiens
DSAKNSSQPIPDTSSSA

SEQ ID NO: 1530 - protein, 17 aa, Homo sapiens
EHVAPGRMSASPQSPTQ

SEQ ID NO: 1531 - protein, 17 aa, Homo sapiens
ERPRAFQPGREDKVASH

SEQ ID NO: 1532 - protein, 17 aa, Homo sapiens
ERVSLSLFPVLERRGLR

SEQ ID NO: 1533 - protein, 17 aa, Homo sapiens
FRQLPEEGCKHASAIWF

SEQ ID NO: 1534 - protein, 17 aa, Homo sapiens
GERTSCWRCSRASTKAS

SEQ ID NO: 1535 - protein, 17 aa, Homo sapiens
GGRRGERGDTAQGPEDQ

SEQ ID NO: 1536 - protein, 17 aa, Homo sapiens
GKEEELRKSCKKKDVRN

SEQ ID NO: 1537 - protein, 17 aa, Homo sapiens
GKGMKKIKKCLHANQQE

SEQ ID NO: 1538 - protein, 17 aa, Homo sapiens
GPTRTVMRSPSSLLPRL

SEQ ID NO: 1539 - protein, 17 aa, Homo sapiens
GTFDETDHFWILCPWKS

SEQ ID NO: 1540 - protein, 17 aa, Homo sapiens
HRSTKNEKSCGVLDGSK

SEQ ID NO: 1541 - protein, 17 aa, Homo sapiens
IDLYLLSCINLGVRKSL

SEQ ID NO: 1542 - protein, 17 aa, Homo sapiens
IKCRCKALPSWPLSDWT

SEQ ID NO: 1543 - protein, 17 aa, Homo sapiens
IKSRVFGSFGYRQPKGM

SEQ ID NO: 1544 - protein, 17 aa, Homo sapiens
IQSKMPRQQIMTAQWLL

SEQ ID NO: 1545 - protein, 17 aa, Homo sapiens
IVKSKDTFWTGISTSQI

SEQ ID NO: 1546 - protein, 17 aa, Homo sapiens
KENALAGQERRGQIPIC

SEQ ID NO: 1547 - protein, 17 aa, Homo sapiens
KFRVFKACRERNNSRSR

SEQ ID NO: 1548 - protein, 17 aa, Homo sapiens
KISSGIWPRRQTKTPLQ

SEQ ID NO: 1549 - protein, 17 aa, Homo sapiens
KLIRSQRFRVAILGLNL

SEQ ID NO: 1550 - protein, 17 aa, Homo sapiens
KNLIMNQALEQMKTKAD

SEQ ID NO: 1551 - protein, 17 aa, Homo sapiens
KQFGTLQRRIKANSRGT

SEQ ID NO: 1552 - protein, 17 aa, Homo sapiens
KSRGKSQSPSLPVLFPS

SEQ ID NO: 1553 - protein, 17 aa, Homo sapiens
KTKSPAFNFEKQRVLVY

SEQ ID NO: 1554 - protein, 17 aa, Homo sapiens
KVSLYYPEAEVFRSFMC

SEQ ID NO: 1555 - protein, 17 aa, Homo sapiens
LILGFTDCPIQSLIKWL

SEQ ID NO: 1556 - protein, 17 aa, Homo sapiens
LKGHLLLRFSKPQRLKN

SEQ ID NO: 1557 - protein, 17 aa, Homo sapiens
LKLTIKSYKRSMLAFSK

SEQ ID NO: 1558 - protein, 17 aa, Homo sapiens
NASRFIPSCNTYHKKQN

SEQ ID NO: 1559 - protein, 17 aa, Homo sapiens
NEESQLEEGARKQEPEP

SEQ ID NO: 1560 - protein, 17 aa, Homo sapiens
NEKKILFLGGMHEPSGG

SEQ ID NO: 1561 - protein, 17 aa, Homo sapiens
NKISSSYQNRKACGKQR

SEQ ID NO: 1562 - protein, 17 aa, Homo sapiens
NKKKNFGKGSKRNRKRN

SEQ ID NO: 1563 - skipped

SEQ ID NO: 1564 - protein, 17 aa, Homo sapiens
NPSLFMKKSLHHLIAPQ

SEQ ID NO: 1565 - protein, 17 aa, Homo sapiens
NQLCAPENHRSHPAQSG

SEQ ID NO: 1566 - protein, 17 aa, Homo sapiens
NQQKLSCKPADCLHGLV

SEQ ID NO: 1567 - protein, 17 aa, Homo sapiens
NSRSWNIFRFASFSRHN

SEQ ID NO: 1568 - protein, 17 aa, Homo sapiens
PLKSFTILTVFYQTLKS

SEQ ID NO: 1569 - protein, 17 aa, Homo sapiens
PSSHRDWRQHTFSFTFL

SEQ ID NO: 1570 - protein, 17 aa, Homo sapiens
QLFEKNRSLILKRKGLR

SEQ ID NO: 1571 - protein, 17 aa, Homo sapiens
QLIVVKIESIMFHWKKL

SEQ ID NO: 1572 - protein, 17 aa, Homo sapiens
QPLKTSSCLILYYQGLI

SEQ ID NO: 1573 - protein, 17 aa, Homo sapiens
QRKPKRANCVIQRRAKM

SEQ ID NO: 1574 - protein, 17 aa, Homo sapiens
QSLTSISATWLWLIWST

SEQ ID NO: 1575 - protein, 17 aa, Homo sapiens
QSRIKNNCRISSHCDEK

SEQ ID NO: 1576 - protein, 17 aa, Homo sapiens
RASDLVKRRYQRQHCEL

SEQ ID NO: 1577 - protein, 17 aa, Homo sapiens
REERGAMQEPHSLLREK

SEQ ID NO: 1578 - protein, 17 aa, Homo sapiens
RGREEGGGGRRPWGRRP

SEQ ID NO: 1579 - protein, 17 aa, Homo sapiens
RMTSAVLLTVLIPCFPN

SEQ ID NO: 1580 - protein, 17 aa, Homo sapiens
RPNHKTSICHSRKDLCK

SEQ ID NO: 1581 - protein, 17 aa, Homo sapiens
RQRKGKTRKGTSIGRRE

SEQ ID NO: 1582 - protein, 17 aa, Homo sapiens
SKRHLKSLTMSRIIQWM

SEQ ID NO: 1583 - protein, 17 aa, Homo sapiens
SSKTIKSLWIERTLRTS

SEQ ID NO: 1584 - protein, 17 aa, Homo sapiens
SVKDLSCSIQDKAFERS

SEQ ID NO: 1585 - protein, 17 aa, Homo sapiens
TDGREREPLDRPHRLRA

SEQ ID NO: 1586 - protein, 17 aa, Homo sapiens
TEAVGMQSNQRSRWATE

SEQ ID NO: 1587 - skipped

SEQ ID NO: 1588 - protein, 17 aa, Homo sapiens
TRKLMPQPEPEKFRDGK

SEQ ID NO: 1589 - protein, 17 aa, Homo sapiens
TTNTCIYETCIWLRRTL

SEQ ID NO: 1590 - protein, 17 aa, Homo sapiens
TTVFYTLFPVLYDFSMS

SEQ ID NO: 1591 - protein, 17 aa, Homo sapiens
TWKCWACTSNQAGVCRV

SEQ ID NO: 1592 - protein, 17 aa, Homo sapiens
VIFFSKPKRIKNLSLKT

SEQ ID NO: 1593 - skipped

SEQ ID NO: 1594 - protein, 17 aa, Homo sapiens
WKTRLMYYKGSYLKQKK

SEQ ID NO: 1595 - protein, 17 aa, Homo sapiens
WLIIYKKCKILALTEKI

SEQ ID NO: 1596 - protein, 17 aa, Homo sapiens
WPWSSLMDRQILVIKRN

SEQ ID NO: 1597 - protein, 17 aa, Homo sapiens
YEHLVCQSRPIKSVSKR

SEQ ID NO: 1598 - protein, 17 aa, Homo sapiens
YTNPNLPSVQCDGTQPE

SEQ ID NO: 1599 - protein, 17 aa, Homo sapiens
YTTLTVSGEMMKEIATK

SEQ ID NO: 1600 - protein, 16 aa, Homo sapiens
AKWSSKQHGSEPSRWV

SEQ ID NO: 1601 - protein, 16 aa, Homo sapiens
AQLFIIMQRCLKWWNV

SEQ ID NO: 1602 - protein, 16 aa, Homo sapiens
ARARSRRKVSTNLKRE

SEQ ID NO: 1603 - protein, 16 aa, Homo sapiens
ASTEKINFTACCSYAP

SEQ ID NO: 1604 - protein, 16 aa, Homo sapiens
CISKLSMAQSKYQNLM

SEQ ID NO: 1605 - protein, 16 aa, Homo sapiens
CLEARAGMNSVKPKPF

SEQ ID NO: 1606 - protein, 16 aa, Homo sapiens
CSNCWKKCQMEFHLRK

SEQ ID NO: 1607 - protein, 16 aa, Homo sapiens
CTNVDIVTLRLQTHLF

SEQ ID NO: 1608 - protein, 16 aa, Homo sapiens
CTSVDIVTLRLQIHLF

SEQ ID NO: 1609 - protein, 16 aa, Homo sapiens
EGKTRQRRVRPKCHLW

SEQ ID NO: 1610 - protein, 16 aa, Homo sapiens
EKGNGLLQNFCLTNMM

SEQ ID NO: 1611 - protein, 16 aa, Homo sapiens
EKGRLYTLLVIQIPLE

SEQ ID NO: 1612 - protein, 16 aa, Homo sapiens
ELQQWQTIYKREVLDL

SEQ ID NO: 1613 - protein, 16 aa, Homo sapiens
ERKTTRTERKKRGISF

SEQ ID NO: 1614 - protein, 16 aa, Homo sapiens
ETFVMTQGDFMSALLS

SEQ ID NO: 1615 - protein, 16 aa, Homo sapiens
FCQGKRSLNGKQEKLL

SEQ ID NO: 1616 - protein, 16 aa, Homo sapiens
FCWTNFGVCSIVQLPL

SEQ ID NO: 1617 - protein, 16 aa, Homo sapiens
FIFFTTFMLVWLKRRN

SEQ ID NO: 1618 - protein, 16 aa, Homo sapiens
FNGYYENKRVFPEVWI

SEQ ID NO: 1619 - protein, 16 aa, Homo sapiens
FQAVLQVFPGQIILAL

SEQ ID NO: 1620 - protein, 16 aa, Homo sapiens
FRLSHRAVFPVQSCLL

SEQ ID NO: 1621 - protein, 16 aa, Homo sapiens
FSMKQTLMNVKNLKTK

SEQ ID NO: 1622 - protein, 16 aa, Homo sapiens
FTELKLQKNLRTQVIV

SEQ ID NO: 1623 - protein, 16 aa, Homo sapiens
FYPIILEFTVIVAQEL

SEQ ID NO: 1624 - protein, 16 aa, Homo sapiens
GDRQEEEEKKRGPRGL

SEQ ID NO: 1625 - protein, 16 aa, Homo sapiens
GENNLPIWNLRNFRKS

SEQ ID NO: 1626 - protein, 16 aa, Homo sapiens
GGPGPHSLLGPGPLVL

SEQ ID NO: 1627 - protein, 16 aa, Homo sapiens
GKDRYCSNIDKHWLNS

SEQ ID NO: 1628 - protein, 16 aa, Homo sapiens
GKIRKLKMSTKIPGET

SEQ ID NO: 1629 - protein, 16 aa, Homo sapiens
GKTRALKIGTKIRGEF

SEQ ID NO: 1630 - protein, 16 aa, Homo sapiens
GLTDPSGIFRISNKTT

SEQ ID NO: 1631 - protein, 16 aa, Homo sapiens
GRKKTWKAWEIKPSKL

SEQ ID NO: 1632 - protein, 16 aa, Homo sapiens
GTTSTLKMSTKILGET

SEQ ID NO: 1633 - protein, 16 aa, Homo sapiens
ICSSSKLPTATSLHLV

SEQ ID NO: 1634 - protein, 16 aa, Homo sapiens
IGKTCWRPDCTSLAEN

SEQ ID NO: 1635 - protein, 16 aa, Homo sapiens
IGLTMLSGGKRRELGF

SEQ ID NO: 1636 - skipped

SEQ ID NO: 1637 - protein, 16 aa, Homo sapiens
IPPSQWGPPPSAAAAG

SEQ ID NO: 1638 - protein, 16 aa, Homo sapiens
IQLQSRGFLMKNQLME

SEQ ID NO: 1639 - protein, 16 aa, Homo sapiens
IQRSFGRYGHKQPSFY

SEQ ID NO: 1640 - protein, 16 aa, Homo sapiens
ISKSSYRPFGPSTKEI

SEQ ID NO: 1641 - protein, 16 aa, Homo sapiens
ISSGIWPRRQTKTPLQ

SEQ ID NO: 1642 - protein, 16 aa, Homo sapiens
IYAQMFQNFKLCALQK

SEQ ID NO: 1643 - protein, 16 aa, Homo sapiens
KELNRGNYYPDCKSTQ

SEQ ID NO: 1644 - protein, 16 aa, Homo sapiens
KKILLIGILRSSQSQK

SEQ ID NO: 1645 - protein, 16 aa, Homo sapiens
KKMSWSLLLKRTFGMV

SEQ ID NO: 1646 - protein, 16 aa, Homo sapiens
KKTRFLPTGGWGCYRR

SEQ ID NO: 1647 - protein, 16 aa, Homo sapiens
KQNQYGCETRTILFEA

SEQ ID NO: 1648 - protein, 16 aa, Homo sapiens
KSCQKHWRRWPLNIMN

SEQ ID NO: 1649 - protein, 16 aa, Homo sapiens
KSYRLVLKELRNPLKV

SEQ ID NO: 1650 - protein, 16 aa, Homo sapiens
KTSASPSEIEGISVCP

SEQ ID NO: 1651 - protein, 16 aa, Homo sapiens
LDPKVPVLMYWELLLI

SEQ ID NO: 1652 - protein, 16 aa, Homo sapiens
LKAVESPIFGVLSFSS

SEQ ID NO: 1653 - protein, 16 aa, Homo sapiens
LLNIKNLANHFAYFQT

SEQ ID NO: 1654 - protein, 16 aa, Homo sapiens
LNCGRPRKLLSIWGTT

SEQ ID NO: 1655 - protein, 16 aa, Homo sapiens
LPIMPCWSPCLAGSLW

SEQ ID NO: 1656 - protein, 16 aa, Homo sapiens
LPSSRFLQLSRQVTTT

SEQ ID NO: 1657 - protein, 16 aa, Homo sapiens
LRLKTKQNQLPLILRR

SEQ ID NO: 1658 - protein, 16 aa, Homo sapiens
LSKTQTLKSRYLHCRN

SEQ ID NO: 1659 - protein, 16 aa, Homo sapiens
LTSRLRRTGRITWVRL

SEQ ID NO: 1660 - protein, 16 aa, Homo sapiens
MACLKKKTRMLDLKTT

SEQ ID NO: 1661 - protein, 16 aa, Homo sapiens
MPRLEASKMIQNIRSF

SEQ ID NO: 1662 - protein, 16 aa, Homo sapiens
NDVRKKKNLFRRVHCI

SEQ ID NO: 1663 - protein, 16 aa, Homo sapiens
NERNAPKWSQSICWTI

SEQ ID NO: 1664 - protein, 16 aa, Homo sapiens
NESDYFSSCISSCFYV

SEQ ID NO: 1665 - protein, 16 aa, Homo sapiens
NETSLCEHRDTDPSGA

SEQ ID NO: 1666 - protein, 16 aa, Homo sapiens
NISSRKQARSEQLFFC

SEQ ID NO: 1667 - protein, 16 aa, Homo sapiens
NKRNSAGHYRSLTRNL

SEQ ID NO: 1668 - protein, 16 aa, Homo sapiens
NKTATGPHRREGDTGR

SEQ ID NO: 1669 - protein, 16 aa, Homo sapiens
NPESVEASWQRSTLHP

SEQ ID NO: 1670 - protein, 16 aa, Homo sapiens
NPHSRLFSRAQTPMAI

SEQ ID NO: 1671 - protein, 16 aa, Homo sapiens
NQARNLCNGRHSRTCQ

SEQ ID NO: 1672 - protein, 16 aa, Homo sapiens
NQGEGQRKQVPVCLDV

SEQ ID NO: 1673 - protein, 16 aa, Homo sapiens
NQITPKAVLKSKENIY

SEQ ID NO: 1674 - protein, 16 aa, Homo sapiens
NRRWCKNIYYLSLPFA

SEQ ID NO: 1675 - protein, 16 aa, Homo sapiens
NSHSFRKDLAPRPCSL

SEQ ID NO: 1676 - protein, 16 aa, Homo sapiens
NSRTSVWYSDLERPLH

SEQ ID NO: 1677 - protein, 16 aa, Homo sapiens
NSSWKFFIWPGGPYDG

SEQ ID NO: 1678 - protein, 16 aa, Homo sapiens
NVCTPFYSYNQPKFSQ

SEQ ID NO: 1679 - protein, 16 aa, Homo sapiens
NVFHSTRCCWCHYKIQ

SEQ ID NO: 1680 - protein, 16 aa, Homo sapiens
NYSSNWSWGVCFMWNT

SEQ ID NO: 1681 - protein, 16 aa, Homo sapiens
NYSTVHRKRFHRPDCY

SEQ ID NO: 1682 - protein, 16 aa, Homo sapiens
NYTVPQTRRLRKRICS

SEQ ID NO: 1683 - protein, 16 aa, Homo sapiens
PKQTCLKGGQQEQGNV

SEQ ID NO: 1684 - protein, 16 aa, Homo sapiens
PSRPRHCLLQAGFQTC

SEQ ID NO: 1685-1686 - skipped (2 entries)

SEQ ID NO: 1687 - protein, 16 aa, Homo sapiens
QPCGGCIQLPHRQKDQ

SEQ ID NO: 1688 - protein, 16 aa, Homo sapiens
QSLKSIKKSKAETEER

SEQ ID NO: 1689 - protein, 16 aa, Homo sapiens
QSTPSWITWMNRKEWN

SEQ ID NO: 1690 - protein, 16 aa, Homo sapiens
QVYLLLLNLDTHIVEI

SEQ ID NO: 1691 - protein, 16 aa, Homo sapiens
RECNLFSARNAPRHEF

SEQ ID NO: 1692 - protein, 16 aa, Homo sapiens
RKKKRKKMKKKTILTT

SEQ ID NO: 1693 - protein, 16 aa, Homo sapiens
RNRKLHRKIAYIPLLL

SEQ ID NO: 1694 - protein, 16 aa, Homo sapiens
RRKDFGIVANLLSKVS

SEQ ID NO: 1695 - protein, 16 aa, Homo sapiens
RSSFWCGKFKEEKSKS

SEQ ID NO: 1696 - protein, 16 aa, Homo sapiens
RSWSSPKSSSSSWWSR

SEQ ID NO: 1697 - protein, 16 aa, Homo sapiens
RTSTGYKVYICWQSRA

SEQ ID NO: 1698 - protein, 16 aa, Homo sapiens
SAITAVEWSFRITATG

SEQ ID NO: 1699 - protein, 16 aa, Homo sapiens
SCFQRRKRRIYQHLRY

SEQ ID NO: 1700 - protein, 16 aa, Homo sapiens
SFEEKQWGTKWILCGN

SEQ ID NO: 1701 - protein, 16 aa, Homo sapiens
SHQCAADRNGREQRAR

SEQ ID NO: 1702 - protein, 16 aa, Homo sapiens
SQLLSKKYQQTQRILL

SEQ ID NO: 1703 - protein, 16 aa, Homo sapiens
SRNHQRPAARNLTSEE

SEQ ID NO: 1704 - protein, 16 aa, Homo sapiens
SRRNYFNFKNNCQSRL

SEQ ID NO: 1705 - protein, 16 aa, Homo sapiens
SSLPPCGASPGPWRRS

SEQ ID NO: 1706 - protein, 16 aa, Homo sapiens
TAAVAAAYLAWATHLK

SEQ ID NO: 1707 - protein, 16 aa, Homo sapiens
TAVTLMVTSMVPGATQ

SEQ ID NO: 1708 - protein, 16 aa, Homo sapiens
TCEDRCCEIHAKKPHE

SEQ ID NO: 1709 - protein, 16 aa, Homo sapiens
TDSGTAPGCHYYSEAL

SEQ ID NO: 1710 - protein, 16 aa, Homo sapiens
TEGVKEAQAPCPGSTT

SEQ ID NO: 1711 - protein, 16 aa, Homo sapiens
TETEAPVQHLSRPHQV

SEQ ID NO: 1712 - protein, 16 aa, Homo sapiens
TIYVRGFTGGYVTLSY

SEQ ID NO: 1713 - protein, 16 aa, Homo sapiens
TMKWWELYLVILSHIA

SEQ ID NO: 1714 - protein, 16 aa, Homo sapiens
TTSSLLHSDCHQHSPG

SEQ ID NO: 1715 - protein, 16 aa, Homo sapiens
TVSCYGPEDSCQENIW

SEQ ID NO: 1716 - protein, 16 aa, Homo sapiens
VHRNQPPHPVLIQHQH

SEQ ID NO: 1717 - protein, 16 aa, Homo sapiens
VLHPGHFPLQVWLLTE

SEQ ID NO: 1718 - protein, 16 aa, Homo sapiens
VMRRKWKSCNIQLGGT

SEQ ID NO: 1719 - protein, 16 aa, Homo sapiens
VRYQHAVSIKCCSLPR

SEQ ID NO: 1720 - protein, 16 aa, Homo sapiens
VTIRIQKQKFRILKRI

SEQ ID NO: 1721 - skipped

SEQ ID NO: 1722 - protein, 16 aa, Homo sapiens
WSRTVGQCPALDEMHC

SEQ ID NO: 1723 - protein, 16 aa, Homo sapiens
YCHCYFPGPAFQTLSH

SEQ ID NO: 1724 - protein, 16 aa, Homo sapiens
YIKMLIGRSGRYIKKR

SEQ ID NO: 1725-1726 - skipped (2 entries)

SEQ ID NO: 1727 - protein, 15 aa, Homo sapiens
CRMKRNRKEEKRALD

SEQ ID NO: 1728 - protein, 15 aa, Homo sapiens
EFINLKMIKWTLLKS

SEQ ID NO: 1729 - protein, 15 aa, Homo sapiens
EIKTTEGKRSCLLKR

SEQ ID NO: 1730 - protein, 15 aa, Homo sapiens
ENLKGESLCQNKEVK

SEQ ID NO: 1731 - protein, 15 aa, Homo sapiens
EQRQWRRLIWHGPHT

SEQ ID NO: 1732 - protein, 15 aa, Homo sapiens
ERRVQGRNRTICEQT

SEQ ID NO: 1733 - protein, 15 aa, Homo sapiens
ESLFHVQEESGTYWV

SEQ ID NO: 1734 - protein, 15 aa, Homo sapiens
EWLILKGLEENLLGI

SEQ ID NO: 1735 - protein, 15 aa, Homo sapiens
FLQKSLRWKNLSQPK

SEQ ID NO: 1736 - protein, 15 aa, Homo sapiens
FRVLNLETLAIYLLQ

SEQ ID NO: 1737 - protein, 15 aa, Homo sapiens
GEEEKEGEEKEAQET

SEQ ID NO: 1738 - protein, 15 aa, Homo sapiens
GHTKNRRKAKRKPQI

SEQ ID NO: 1739 - protein, 15 aa, Homo sapiens
GKLGAIVPRVVKTLI

SEQ ID NO: 1740 - protein, 15 aa, Homo sapiens
GKRRKILRTGRKLSV

SEQ ID NO: 1741 - protein, 15 aa, Homo sapiens
GLLLANGSLLLLSLS

SEQ ID NO: 1742 - protein, 15 aa, Homo sapiens
GLPQCGDSFLKRPLT

SEQ ID NO: 1743 - protein, 15 aa, Homo sapiens
GMRLGSGTGMFTSAN

SEQ ID NO: 1744-1745 - skipped (2 entries)

SEQ ID NO: 1746 - protein, 15 aa, Homo sapiens
HLTLARMKHFIYFKH

SEQ ID NO: 1747 - protein, 15 aa, Homo sapiens
HPSPRLLLQSDSSHL

SEQ ID NO: 1748 - protein, 15 aa, Homo sapiens
KEEMLKRCTKKLGKS

SEQ ID NO: 1749 - protein, 15 aa, Homo sapiens
KEPEISDTCTESPCV

SEQ ID NO: 1750 - protein, 15 aa, Homo sapiens
KIPRFQGPHDGAENL

SEQ ID NO: 1751 - protein, 15 aa, Homo sapiens
KKSHNRRFARSLIWW

SEQ ID NO: 1752 - protein, 15 aa, Homo sapiens
KKSLQSTVLLVLSML

SEQ ID NO: 1753 - protein, 15 aa, Homo sapiens
KQAQINDLSTSYTVL

SEQ ID NO: 1754 - protein, 15 aa, Homo sapiens
KRNKQSSCEREIGKP

SEQ ID NO: 1755 - protein, 15 aa, Homo sapiens
KRVVFCPSEGDRHRL

SEQ ID NO: 1756 - protein, 15 aa, Homo sapiens
KTCRAEDGSGFATHP

SEQ ID NO: 1757 - protein, 15 aa, Homo sapiens
KTIIINFKCRSLQIF

SEQ ID NO: 1758 - protein, 15 aa, Homo sapiens
LCCCPRNFYRRTKIR

SEQ ID NO: 1759 - protein, 15 aa, Homo sapiens
LCRPGFQWRLYSLWK

SEQ ID NO: 1760 - protein, 15 aa, Homo sapiens
LEYCQTTLKAKELFL

SEQ ID NO: 1761 - protein, 15 aa, Homo sapiens
LFKNTLRRKKISEEG

SEQ ID NO: 1762 - protein, 15 aa, Homo sapiens
LLEKQLELLDLMFCD

SEQ ID NO: 1763 - protein, 15 aa, Homo sapiens
LLTPGGELPHGILGQ

SEQ ID NO: 1764 - protein, 15 aa, Homo sapiens
LMRKRMTTPIEFLKL

SEQ ID NO: 1765 - protein, 15 aa, Homo sapiens
LNRMKVPLMKLITRV

SEQ ID NO: 1766 - protein, 15 aa, Homo sapiens
LPQEMSLFVLKKVKL

SEQ ID NO: 1767 - protein, 15 aa, Homo sapiens
LSLNSKKNVKTRRIL

SEQ ID NO: 1768 - protein, 15 aa, Homo sapiens
LSNEYIKNLIQLERF

SEQ ID NO: 1769 - protein, 15 aa, Homo sapiens
LTFPQKTFIRTSTGC

SEQ ID NO: 1770 - protein, 15 aa, Homo sapiens
LYLDSSRYQERCYYT

SEQ ID NO: 1771-1772 - skipped (2 entries)

SEQ ID NO: 1773 - protein, 15 aa, Homo sapiens
MHRHHKTMHKEKIRE

SEQ ID NO: 1774 - protein, 15 aa, Homo sapiens
MKVLYPKQWSTCLAG

SEQ ID NO: 1775 - skipped

SEQ ID NO: 1776 - protein, 15 aa, Homo sapiens
NDQSCRSKKSNEEKF

SEQ ID NO: 1777 - protein, 15 aa, Homo sapiens
NEISIFRKHKDNKNG

SEQ ID NO: 1778 - protein, 15 aa, Homo sapiens
NFKFGKRVGCLSEGS

SEQ ID NO: 1779 - protein, 15 aa, Homo sapiens
NFQIKQNPVSGRLQN

SEQ ID NO: 1780 - protein, 15 aa, Homo sapiens
NFSHPKCQCIRKPSR

SEQ ID NO: 1781 - protein, 15 aa, Homo sapiens
NGGTGEGLWPLLGGQ

SEQ ID NO: 1782 - protein, 15 aa, Homo sapiens
NILLIWASHMDQLFK

SEQ ID NO: 1783 - protein, 15 aa, Homo sapiens
NMEESWHCLFGLSYL

SEQ ID NO: 1784 - protein, 15 aa, Homo sapiens
NPVLDSWRGVFVRYQ

SEQ ID NO: 1785 - protein, 15 aa, Homo sapiens
NQSSKRCFRRQTPRT

SEQ ID NO: 1786 - protein, 15 aa, Homo sapiens
NSCISTKVAAVEGRD

SEQ ID NO: 1787 - protein, 15 aa, Homo sapiens
NTELGKTTEVELQSL

SEQ ID NO: 1788 - protein, 15 aa, Homo sapiens
NTPCKDQQTKNQRER

SEQ ID NO: 1789 - protein, 15 aa, Homo sapiens
NYQGDDESVRYRQFS

SEQ ID NO: 1790 - protein, 15 aa, Homo sapiens
PGKERARIRAAENGL

SEQ ID NO: 1791 - protein, 15 aa, Homo sapiens
PKDKSCLIRLCTTWT

SEQ ID NO: 1792 - protein, 15 aa, Homo sapiens
PRFWWVLIKMKGQLF

SEQ ID NO: 1793 - protein, 15 aa, Homo sapiens
PSCCSEKSEEADPEG

SEQ ID NO: 1794 - skipped

SEQ ID NO: 1795 - protein, 15 aa, Homo sapiens
QVCILTKSQNWKWKA

SEQ ID NO: 1796 - protein, 15 aa, Homo sapiens
RKEEALRMPGLQQCV

SEQ ID NO: 1797 - protein, 15 aa, Homo sapiens
RKEESSGGSPLGWHG

SEQ ID NO: 1798 - protein, 15 aa, Homo sapiens
RKKKAVRQIQPRISL

SEQ ID NO: 1799 - protein, 15 aa, Homo sapiens
RKREGNCKTKTTHST

SEQ ID NO: 1800 - protein, 15 aa, Homo sapiens
RMRIWMRLKPTFQSL

SEQ ID NO: 1801 - protein, 15 aa, Homo sapiens
RNRSSCSAPQSSTPS

SEQ ID NO: 1802 - protein, 15 aa, Homo sapiens
RRKEMGSSKISASQI

SEQ ID NO: 1803 - protein, 15 aa, Homo sapiens
RWLGSWKFCDLRNAV

SEQ ID NO: 1804 - skipped

SEQ ID NO: 1805 - protein, 15 aa, Homo sapiens
SCRKLIRLSWSYSIH

SEQ ID NO: 1806 - protein, 15 aa, Homo sapiens
SDLDRKLAEKRTRLY

SEQ ID NO: 1807 - protein, 15 aa, Homo sapiens
SGTINDWSKRREINN

SEQ ID NO: 1808 - protein, 15 aa, Homo sapiens
SIRRCSTTIWAWDRI

SEQ ID NO: 1809 - protein, 15 aa, Homo sapiens
SISLTKASILKDQWK

SEQ ID NO: 1810 - protein, 15 aa, Homo sapiens
SNTCFRSLHCAGLSL

SEQ ID NO: 1811 - protein, 15 aa, Homo sapiens
SREKRSCLRVGPTSC

SEQ ID NO: 1812 - protein, 15 aa, Homo sapiens
SRFQLTRSQMLSCIH

SEQ ID NO: 1813 - protein, 15 aa, Homo sapiens
SRPLRDFTSRARPRR

SEQ ID NO: 1814 - protein, 15 aa, Homo sapiens
SRRLPRRWQTKFHVQ

SEQ ID NO: 1815 - skipped

SEQ ID NO: 1816 - protein, 15 aa, Homo sapiens
TAGDQNGRDGGGGQW

SEQ ID NO: 1817 - protein, 15 aa, Homo sapiens
TGAEGIWIPFSARGP

SEQ ID NO: 1818 - protein, 15 aa, Homo sapiens
TKRQAIISLGQNHFH

SEQ ID NO: 1819 - protein, 15 aa, Homo sapiens
TLLASLSRRHLTQLV

SEQ ID NO: 1820 - protein, 15 aa, Homo sapiens
TRTTYSWSSLCAPPT

SEQ ID NO: 1821 - protein, 15 aa, Homo sapiens
TVHISVIISESSRTY

SEQ ID NO: 1822 - protein, 15 aa, Homo sapiens
VLLENLVYRNFGSGA

SEQ ID NO: 1823 - protein, 15 aa, Homo sapiens
VLSLARVSPVNTELN

SEQ ID NO: 1824 - protein, 15 aa, Homo sapiens
VLYRMMLLQCQGKHL

SEQ ID NO: 1825 - protein, 15 aa, Homo sapiens
VRKQLTTVNCSASTV

SEQ ID NO: 1826 - protein, 15 aa, Homo sapiens
VSFTKTVFLHLLQKM

SEQ ID NO: 1827 - protein, 15 aa, Homo sapiens
WKSHTILQCGQLCRN

SEQ ID NO: 1828 - protein, 15 aa, Homo sapiens
WNSYSYGQKLSFQDT

SEQ ID NO: 1829 - protein, 15 aa, Homo sapiens
YCTKDHSEGSSPFSR

SEQ ID NO: 1830 - protein, 15 aa, Homo sapiens
YFGMNLKMSPSRTLH

SEQ ID NO: 1831 - skipped

SEQ ID NO: 1832 - protein, 15 aa, Homo sapiens
YGPQPVAMQHFRTRD

SEQ ID NO: 1833 - protein, 15 aa, Homo sapiens
YLKKSWKKKLTRRLN

SEQ ID NO: 1834 - protein, 15 aa, Homo sapiens
YRICSGSLSRGFLIS

SEQ ID NO: 1835 - protein, 15 aa, Homo sapiens
YSVPKLFQYLWVSLT

SEQ ID NO: 1836 - skipped

SEQ ID NO: 1837 - protein, 14 aa, Homo sapiens
AESCPKDEESYWNY

SEQ ID NO: 1838 - protein, 14 aa, Homo sapiens
AFSASIPNAEDHGI

SEQ ID NO: 1839 - protein, 14 aa, Homo sapiens
CGGVPEVPRVDDTL

SEQ ID NO: 1840 - protein, 14 aa, Homo sapiens
CHQEKHLSISWRPR

SEQ ID NO: 1841 - protein, 14 aa, Homo sapiens
CLCLVNHTKIQQKL

SEQ ID NO: 1842 - protein, 14 aa, Homo sapiens
CLINTCFPWPWRKM

SEQ ID NO: 1843 - protein, 14 aa, Homo sapiens
CLQLQNSLSPPHSL

SEQ ID NO: 1844 - protein, 14 aa, Homo sapiens
CSLLILICDQLFLK

SEQ ID NO: 1845 - protein, 14 aa, Homo sapiens
DITITLELRTIWIV

SEQ ID NO: 1846 - protein, 14 aa, Homo sapiens
DLKRMMMRNQENVS

SEQ ID NO: 1847 - protein, 14 aa, Homo sapiens
EGEDYRRQNFRFEE

SEQ ID NO: 1848 - protein, 14 aa, Homo sapiens
EGNLIQNRSPTPSE

SEQ ID NO: 1849 - protein, 14 aa, Homo sapiens
EKEYGRKTLKKKVT

SEQ ID NO: 1850 - protein, 14 aa, Homo sapiens
ELWGPRKGEPNENG

SEQ ID NO: 1851 - protein, 14 aa, Homo sapiens
EWQQPNNVLGRSLS

SEQ ID NO: 1852 - protein, 14 aa, Homo sapiens
FEDVNSWPNESPRN

SEQ ID NO: 1853 - protein, 14 aa, Homo sapiens
FLLVAFLQIHLKRK

SEQ ID NO: 1854 - protein, 14 aa, Homo sapiens
FRIWSDKLRKWKGF

SEQ ID NO: 1855 - protein, 14 aa, Homo sapiens
FRTFYKQRRQSGTK

SEQ ID NO: 1856 - protein, 14 aa, Homo sapiens
FYKTSNLEIPFMML

SEQ ID NO: 1857 - protein, 14 aa, Homo sapiens
GASPATCLPCRGSS

SEQ ID NO: 1858 - protein, 14 aa, Homo sapiens
GGRMRNIFTPAGHK

SEQ ID NO: 1859 - protein, 14 aa, Homo sapiens
GKIYSQGKDLIFLT

SEQ ID NO: 1860 - protein, 14 aa, Homo sapiens
GKRKKATRIQVLSV

SEQ ID NO: 1861 - protein, 14 aa, Homo sapiens
GKRMYGWNFRVRGG

SEQ ID NO: 1862 - protein, 14 aa, Homo sapiens
GLETSLSWRSNALP

SEQ ID NO: 1863 - protein, 14 aa, Homo sapiens
GLLHILEQHGNLED

SEQ ID NO: 1864 - protein, 14 aa, Homo sapiens
GNSSFKPRKTGAVQ

SEQ ID NO: 1865 - protein, 14 aa, Homo sapiens
GWRRFRSFRRTYVL

SEQ ID NO: 1866 - protein, 14 aa, Homo sapiens
HLRGPCLQSRGDRI

SEQ ID NO: 1867 - protein, 14 aa, Homo sapiens
HNYRRLNLSKSQSL

SEQ ID NO: 1868 - skipped

SEQ ID NO: 1869 - protein, 14 aa, Homo sapiens
ILPQISIQQPSENS

SEQ ID NO: 1870 - protein, 14 aa, Homo sapiens
IQEHCSTKRIRGHQ

SEQ ID NO: 1871 - protein, 14 aa, Homo sapiens
IRNTSQFRLEHMLI

SEQ ID NO: 1872 - protein, 14 aa, Homo sapiens
ISKIEGLLKKGGRK

SEQ ID NO: 1873 - protein, 14 aa, Homo sapiens
ISSLIGMMGPFWGL

SEQ ID NO: 1874 - protein, 14 aa, Homo sapiens
ITEIVFQKYQIYKK

SEQ ID NO: 1875 - protein, 14 aa, Homo sapiens
IVRKQIPSNWFWEV

SEQ ID NO: 1876 - protein, 14 aa, Homo sapiens
KASSPATMWPNSTP

SEQ ID NO: 1877 - protein, 14 aa, Homo sapiens
KEFTLCCRLLQSQD

SEQ ID NO: 1878 - protein, 14 aa, Homo sapiens
KETPQTVPGSEEKV

SEQ ID NO: 1879 - protein, 14 aa, Homo sapiens
KFFNIVFRNSKTKK

SEQ ID NO: 1880 - protein, 14 aa, Homo sapiens
KGKTDTVPTSTSTG

SEQ ID NO: 1881 - protein, 14 aa, Homo sapiens
KGQCGDNSQHQSEK

SEQ ID NO: 1882 - protein, 14 aa, Homo sapiens
KILKLVTRMANRRK

SEQ ID NO: 1883 - protein, 14 aa, Homo sapiens
KKGCKLSNKASSHR

SEQ ID NO: 1884 - protein, 14 aa, Homo sapiens
KKNFNRLPVSEEKR

SEQ ID NO: 1885 - protein, 14 aa, Homo sapiens
KKPHKEDTGPYRRC

SEQ ID NO: 1886 - protein, 14 aa, Homo sapiens
KKRKLLNQKKKLRK

SEQ ID NO: 1887 - protein, 14 aa, Homo sapiens
KKSRGPPSQLHSRG

SEQ ID NO: 1888 - protein, 14 aa, Homo sapiens
KKVENNQTRTKNPR

SEQ ID NO: 1889 - protein, 14 aa, Homo sapiens
KMDNGERNTKEDYF

SEQ ID NO: 1890 - protein, 14 aa, Homo sapiens
KSCRACPEPQLHVR

SEQ ID NO: 1891 - protein, 14 aa, Homo sapiens
KTAIRVSFCFRTFF

SEQ ID NO: 1892 - protein, 14 aa, Homo sapiens
KTNKITVTRKPGDW

SEQ ID NO: 1893 - protein, 14 aa, Homo sapiens
KVYQHQVFCFHGDG

SEQ ID NO: 1894 - protein, 14 aa, Homo sapiens
LCCILGIFHCKCGC

SEQ ID NO: 1895 - protein, 14 aa, Homo sapiens
LHQRTASGRSGPSW

SEQ ID NO: 1896 - protein, 14 aa, Homo sapiens
LIKPDSWKTVCLTG

SEQ ID NO: 1897 - protein, 14 aa, Homo sapiens
LKWFHLSQLKINLS

SEQ ID NO: 1898 - protein, 14 aa, Homo sapiens
LLGPLTQIHQILLS

SEQ ID NO: 1899 - protein, 14 aa, Homo sapiens
LLPILWVCTFSRPA

SEQ ID NO: 1900 - skipped

SEQ ID NO: 1901 - protein, 14 aa, Homo sapiens
LQCQHLGPPKYWWF

SEQ ID NO: 1902 - protein, 14 aa, Homo sapiens
LQISLPMKDHHLFL

SEQ ID NO: 1903 - protein, 14 aa, Homo sapiens
LRISGAQLRDFLVT

SEQ ID NO: 1904 - protein, 14 aa, Homo sapiens
LVLSTKKIMTAKDL

SEQ ID NO: 1905 - protein, 14 aa, Homo sapiens
LVMTLPRQRVTGRA

SEQ ID NO: 1906 - protein, 14 aa, Homo sapiens
MEVLGLHLKPSRCV

SEQ ID NO: 1907 - protein, 14 aa, Homo sapiens
MSMRHRKKCLKWSN

SEQ ID NO: 1908 - protein, 14 aa, Homo sapiens
NADCFTRTCYKSNC

SEQ ID NO: 1909 - protein, 14 aa, Homo sapiens
NCSPKKNAQICQFQ

SEQ ID NO: 1910 - protein, 14 aa, Homo sapiens
NDTQAWASYPRRQM

SEQ ID NO: 1911 - protein, 14 aa, Homo sapiens
NIERFARSSVPFGD

SEQ ID NO: 1912 - protein, 14 aa, Homo sapiens
NIRNRRMGGVFRIL

SEQ ID NO: 1913 - protein, 14 aa, Homo sapiens
NIVGSNTTTENGIV

SEQ ID NO: 1914 - protein, 14 aa, Homo sapiens
NLLFSKKIWFIFFY

SEQ ID NO: 1915 - protein, 14 aa, Homo sapiens
NMVFEKEENIYITL

SEQ ID NO: 1916 - skipped

SEQ ID NO: 1917 - protein, 14 aa, Homo sapiens
NPEGCSDHLQEGRR

SEQ ID NO: 1918 - protein, 14 aa, Homo sapiens
NQAVRAKCWEPVWG

SEQ ID NO: 1919 - protein, 14 aa, Homo sapiens
NQLYHPLFNKFGDF

SEQ ID NO: 1920 - protein, 14 aa, Homo sapiens
NSAFIQSTFFISEG

SEQ ID NO: 1921 - protein, 14 aa, Homo sapiens
NSHYSPPPAASDPQ

SEQ ID NO: 1922 - protein, 14 aa, Homo sapiens
NSWKKKSKKQKRDC

SEQ ID NO: 1923 - protein, 14 aa, Homo sapiens
NTKIPTEKSSSGKT

SEQ ID NO: 1924 - protein, 14 aa, Homo sapiens
NVSRQPAASYLHNK

SEQ ID NO: 1925 - protein, 14 aa, Homo sapiens
NWGPRETERIHCLP

SEQ ID NO: 1926 - protein, 14 aa, Homo sapiens
PIKKNPSMKSFIFV

SEQ ID NO: 1927 - protein, 14 aa, Homo sapiens
PKVHTQTTGLPDDF

SEQ ID NO: 1928 - protein, 14 aa, Homo sapiens
PMNVSSVGKHYLIL

SEQ ID NO: 1929 - protein, 14 aa, Homo sapiens
PSSGHANLWWMVWR

SEQ ID NO: 1930 - protein, 14 aa, Homo sapiens
PWKNSESMKKVKCI

SEQ ID NO: 1931 - protein, 14 aa, Homo sapiens
QENPLPTNTSKLTK

SEQ ID NO: 1932 - protein, 14 aa, Homo sapiens
REINHSKQLPQKFC

SEQ ID NO: 1933 - protein, 14 aa, Homo sapiens
RKFWMTQLKIFVLC

SEQ ID NO: 1934 - protein, 14 aa, Homo sapiens
RKRSHSQYHLSPPG

SEQ ID NO: 1935 - skipped

SEQ ID NO: 1936 - protein, 14 aa, Homo sapiens
SCLFQSPSPTLQMN

SEQ ID NO: 1937 - protein, 14 aa, Homo sapiens
SKERKEKKEQETEI

SEQ ID NO: 1938 - protein, 14 aa, Homo sapiens
SKSCCRSSSQTFRQ

SEQ ID NO: 1939 - protein, 14 aa, Homo sapiens
SLNQRSYARPSCQP

SEQ ID NO: 1940 - protein, 14 aa, Homo sapiens
SSLRLDKVQSHMSI

SEQ ID NO: 1941 - protein, 14 aa, Homo sapiens
SYLKNCGSQVKRST

SEQ ID NO: 1942 - protein, 14 aa, Homo sapiens
SYMCWRRSSILNKK

SEQ ID NO: 1943 - protein, 14 aa, Homo sapiens
TGSSRHHPKDCWRK

SEQ ID NO: 1944 - protein, 14 aa, Homo sapiens
TGWQPLFLFIIVVL

SEQ ID NO: 1945 - protein, 14 aa, Homo sapiens
TIKEGRKTYNCRGG

SEQ ID NO: 1946 - protein, 14 aa, Homo sapiens
TIQCQSSFNICGSL

SEQ ID NO: 1947 - skipped

SEQ ID NO: 1948 - protein, 14 aa, Homo sapiens
TQSSTTSYQSYPVE

SEQ ID NO: 1949 - protein, 14 aa, Homo sapiens
TRPRGSPTCCQTVA

SEQ ID NO: 1950 - protein, 14 aa, Homo sapiens
TRQFRGWISMISHH

SEQ ID NO: 1951 - protein, 14 aa, Homo sapiens
TRRLFGARESWETW

SEQ ID NO: 1952 - protein, 14 aa, Homo sapiens
TTNLSVHQGLHMVV

SEQ ID NO: 1953 - protein, 14 aa, Homo sapiens
VGTNQKGFSSSRRK

SEQ ID NO: 1954 - protein, 14 aa, Homo sapiens
VKKQYPVERCRCWL

SEQ ID NO: 1955 - protein, 14 aa, Homo sapiens
VKTTTYFSWKICMQ

SEQ ID NO: 1956 - protein, 14 aa, Homo sapiens
VPALKKLRSPLWIF

SEQ ID NO: 1957 - protein, 14 aa, Homo sapiens
VQKHSGKFRISLSF

SEQ ID NO: 1958 - protein, 14 aa, Homo sapiens
WEPWVLLPWTAKGM

SEQ ID NO: 1959 - protein, 14 aa, Homo sapiens
WKKLSRKQRRCKKR

SEQ ID NO: 1960 - protein, 14 aa, Homo sapiens
WLILMVKNLDVKRS

SEQ ID NO: 1961 - protein, 14 aa, Homo sapiens
YAPFKRWIENDFDL

SEQ ID NO: 1962 - protein, 14 aa, Homo sapiens
YARIAGRNAKWSST

SEQ ID NO: 1963 - protein, 14 aa, Homo sapiens
YEYYKGFVGSSCRS

SEQ ID NO: 1964 - protein, 14 aa, Homo sapiens
YHQRPGRGIHKDSG

SEQ ID NO: 1965 - protein, 14 aa, Homo sapiens
YNKAECGAKVPCGL

SEQ ID NO: 1966 - protein, 13 aa, Homo sapiens
APVYFRAHPPPFK

SEQ ID NO: 1967 - protein, 13 aa, Homo sapiens
AQPKTVPSNQILR

SEQ ID NO: 1968 - protein, 13 aa, Homo sapiens
ASQCCSRNGTGKV

SEQ ID NO: 1969 - protein, 13 aa, Homo sapiens
ASQHQSLLRAKKQ

SEQ ID NO: 1970 - protein, 13 aa, Homo sapiens
CESVTTGTAQTGH

SEQ ID NO: 1971 - protein, 13 aa, Homo sapiens
CFMLEKTENKIVW

SEQ ID NO: 1972 - protein, 13 aa, Homo sapiens
CKRETIFVITRLI

SEQ ID NO: 1973 - protein, 13 aa, Homo sapiens
CTASTRIQRCLSS

SEQ ID NO: 1974 - protein, 13 aa, Homo sapiens
CTCTNTDRRCKYC

SEQ ID NO: 1975 - protein, 13 aa, Homo sapiens
DEKIKRRWNRRRK

SEQ ID NO: 1976 - protein, 13 aa, Homo sapiens
DLLISIQMLPLLF

SEQ ID NO: 1977 - protein, 13 aa, Homo sapiens
EEAKELKRRKERI

SEQ ID NO: 1978 - protein, 13 aa, Homo sapiens
EKVSLPGHHSKRW

SEQ ID NO: 1979 - protein, 13 aa, Homo sapiens
EMLPPTKTVHSIP

SEQ ID NO: 1980 - protein, 13 aa, Homo sapiens
EQKTEWEWKLQIE

SEQ ID NO: 1981 - protein, 13 aa, Homo sapiens
FLKWLRLWLMVQT

SEQ ID NO: 1982 - protein, 13 aa, Homo sapiens
GKLKKLNQHQQLS

SEQ ID NO: 1983 - protein, 13 aa, Homo sapiens
GLEKEYLMVNQKE

SEQ ID NO: 1984 - protein, 13 aa, Homo sapiens
GLPETEKMPQLMP

SEQ ID NO: 1985 - protein, 13 aa, Homo sapiens
GNSKMKPGNILPL

SEQ ID NO: 1986 - protein, 13 aa, Homo sapiens
GRCYQLPQLQGFL

SEQ ID NO: 1987 - protein, 13 aa, Homo sapiens
GSFFQAKGKRKNK

SEQ ID NO: 1988 - protein, 13 aa, Homo sapiens
IFLLLEKVGLNFV

SEQ ID NO: 1989 - protein, 13 aa, Homo sapiens
IKDHIFLCDSSRE

SEQ ID NO: 1990 - protein, 13 aa, Homo sapiens
IQIPVSEVYTVLD

SEQ ID NO: 1991 - protein, 13 aa, Homo sapiens
IQPVLHKACHITH

SEQ ID NO: 1992 - protein, 13 aa, Homo sapiens
IQVTVKAAIIMAQ

SEQ ID NO: 1993 - protein, 13 aa, Homo sapiens
IRLLKCDRTCWSS

SEQ ID NO: 1994 - protein, 13 aa, Homo sapiens
ISGIHPSSDWSTC

SEQ ID NO: 1995 - protein, 13 aa, Homo sapiens
ISVQIVTLQLTRK

SEQ ID NO: 1996 - protein, 13 aa, Homo sapiens
IWERTEGTSTCEK

SEQ ID NO: 1997 - protein, 13 aa, Homo sapiens
KASNMKLQILLYS

SEQ ID NO: 1998 - protein, 13 aa, Homo sapiens
KDCKGDDCSQILW

SEQ ID NO: 1999 - protein, 13 aa, Homo sapiens
KDSSDKGHTMPGR

SEQ ID NO: 2000 - protein, 13 aa, Homo sapiens
KDSSDKGRTMPGR

SEQ ID NO: 2001 - protein, 13 aa, Homo sapiens
KEEEDQGVWQGGR

SEQ ID NO: 2002 - protein, 13 aa, Homo sapiens
KFGLCRQHFEKIK

SEQ ID NO: 2003 - protein, 13 aa, Homo sapiens
KHNGIWFYYYWWR

SEQ ID NO: 2004 - protein, 13 aa, Homo sapiens
KHVIELSTSLDCG

SEQ ID NO: 2005 - protein, 13 aa, Homo sapiens
KIFYSILRDLLGS

SEQ ID NO: 2006 - protein, 13 aa, Homo sapiens
KKGEDSQDEKRQI

SEQ ID NO: 2007 - protein, 13 aa, Homo sapiens
KKGKKESLPRQDD

SEQ ID NO: 2008 - protein, 13 aa, Homo sapiens
KKGKRSRNSQTVF

SEQ ID NO: 2009 - protein, 13 aa, Homo sapiens
KLQEFRCYQCETV

SEQ ID NO: 2010 - protein, 13 aa, Homo sapiens
KNHRESYSSTHTL

SEQ ID NO: 2011 - protein, 13 aa, Homo sapiens
KNNLSYKNKEERA

SEQ ID NO: 2012 - protein, 13 aa, Homo sapiens
KQGPGQGGRYQQI

SEQ ID NO: 2013 - protein, 13 aa, Homo sapiens
KREKKKKEGTATE

SEQ ID NO: 2014 - protein, 13 aa, Homo sapiens
KRSRGKRKTCQNS

SEQ ID NO: 2015 - protein, 13 aa, Homo sapiens
KTTMKQLQCWSRY

SEQ ID NO: 2016 - protein, 13 aa, Homo sapiens
LILEKSPINVKKC

SEQ ID NO: 2017 - protein, 13 aa, Homo sapiens
LKDIRFWILAWHI

SEQ ID NO: 2018 - protein, 13 aa, Homo sapiens
LKRYLILMKLKKV

SEQ ID NO: 2019 - protein, 13 aa, Homo sapiens
LKTLRRKKKTRMS

SEQ ID NO: 2020 - protein, 13 aa, Homo sapiens
LLYTIIHLFCLKK

SEQ ID NO: 2021 - skipped

SEQ ID NO: 2022 - protein, 13 aa, Homo sapiens
LNYLRKGNLNLNQ

SEQ ID NO: 2023 - protein, 13 aa, Homo sapiens
LQSHLVQSQQHLH

SEQ ID NO: 2024 - protein, 13 aa, Homo sapiens
LSNIRARQEGKSG

SEQ ID NO: 2025 - skipped

SEQ ID NO: 2026 - protein, 13 aa, Homo sapiens
LVWMMKKSLISSG

SEQ ID NO: 2027 - protein, 13 aa, Homo sapiens
MFCPCFSLFKFSL

SEQ ID NO: 2028 - protein, 13 aa, Homo sapiens
MQNLILHLQRKKD

SEQ ID NO: 2029 - protein, 13 aa, Homo sapiens
NARHRTGGEIRYG

SEQ ID NO: 2030 - protein, 13 aa, Homo sapiens
NCCLLFNDFVYIP

SEQ ID NO: 2031 - protein, 13 aa, Homo sapiens
NDFQFPCGSLRLS

SEQ ID NO: 2032 - protein, 13 aa, Homo sapiens
NESYFMDNEEKSG

SEQ ID NO: 2033 - protein, 13 aa, Homo sapiens
NFMVSSTIKSKSS

SEQ ID NO: 2034 - protein, 13 aa, Homo sapiens
NFSFSGIKYNRFT

SEQ ID NO: 2035 - protein, 13 aa, Homo sapiens
NFTQEPFISGDYS

SEQ ID NO: 2036 - protein, 13 aa, Homo sapiens
NGICFLGVCHSRR

SEQ ID NO: 2037 - protein, 13 aa, Homo sapiens
NGLSFTKNARYWL

SEQ ID NO: 2038 - protein, 13 aa, Homo sapiens
NGSIPYQSRKRED

SEQ ID NO: 2039 - protein, 13 aa, Homo sapiens
NHWFTKKDSESFE

SEQ ID NO: 2040 - protein, 13 aa, Homo sapiens
NKCRELCTIVEFC

SEQ ID NO: 2041 - protein, 13 aa, Homo sapiens
NKSCKRARNQRWW

SEQ ID NO: 2042 - protein, 13 aa, Homo sapiens
NNRTEKESLWRFR

SEQ ID NO: 2043 - protein, 13 aa, Homo sapiens
NPKSTCSRQIWEP

SEQ ID NO: 2044 - protein, 13 aa, Homo sapiens
NQQRRKDSWLCEN

SEQ ID NO: 2045 - protein, 13 aa, Homo sapiens
NQRGKHKKQDKIL

SEQ ID NO: 2046 - protein, 13 aa, Homo sapiens
NRFHCASSLIQKQ

SEQ ID NO: 2047 - protein, 13 aa, Homo sapiens
NRPMEGRGYWPEK

SEQ ID NO: 2048 - protein, 13 aa, Homo sapiens
NSEFCGGGNPASL

SEQ ID NO: 2049 - protein, 13 aa, Homo sapiens
NSKKWAHFTVNFQ

SEQ ID NO: 2050 - protein, 13 aa, Homo sapiens
NSSQQKRAKTYYG

SEQ ID NO: 2051 - protein, 13 aa, Homo sapiens
NTGEQATRLPSFC

SEQ ID NO: 2052 - protein, 13 aa, Homo sapiens
NTPASKRKKLTWK

SEQ ID NO: 2053 - protein, 13 aa, Homo sapiens
NTSFKTGGQRLCP

SEQ ID NO: 2054 - protein, 13 aa, Homo sapiens
NTYWRETTELECV

SEQ ID NO: 2055 - protein, 13 aa, Homo sapiens
PCLQAGSCNYPGR

SEQ ID NO: 2056 - protein, 13 aa, Homo sapiens
PFLPIQKAASGRG

SEQ ID NO: 2057 - protein, 13 aa, Homo sapiens
PLLFIPIFLLQTS

SEQ ID NO: 2058 - protein, 13 aa, Homo sapiens
PPGLLRVLLLWRF

SEQ ID NO: 2059 - protein, 13 aa, Homo sapiens
QETQWRQKKIPRF

SEQ ID NO: 2060 - protein, 13 aa, Homo sapiens
QIPRYSSISTSWI

SEQ ID NO: 2061 - protein, 13 aa, Homo sapiens
QKFRPTLPPGNSF

SEQ ID NO: 2062 - protein, 13 aa, Homo sapiens
QKKQLEDSSWLIK

SEQ ID NO: 2063 - protein, 13 aa, Homo sapiens
RKNQRCLTFQPFT

SEQ ID NO: 2064 - protein, 13 aa, Homo sapiens
RKSKKKSKGNRVH

SEQ ID NO: 2065 - protein, 13 aa, Homo sapiens
RNFYSLEHFLKLP

SEQ ID NO: 2066 - protein, 13 aa, Homo sapiens
RNGNSQTTSWEDP

SEQ ID NO: 2067 - protein, 13 aa, Homo sapiens
RRHDVPQDLHTEA

SEQ ID NO: 2068 - protein, 13 aa, Homo sapiens
RSFKGQMGRRHNL

SEQ ID NO: 2069 - protein, 13 aa, Homo sapiens
RSSFPYRNSCSVF

SEQ ID NO: 2070 - protein, 13 aa, Homo sapiens
RTILDHTRSLSQR

SEQ ID NO: 2071 - protein, 13 aa, Homo sapiens
RTRSLCKNRTYPW

SEQ ID NO: 2072 - protein, 13 aa, Homo sapiens
SAKQRFYLLPRWD

SEQ ID NO: 2073 - protein, 13 aa, Homo sapiens
SAYYEAPQRGSYV

SEQ ID NO: 2074 - protein, 13 aa, Homo sapiens
SEEGLIINRFQHY

SEQ ID NO: 2075 - protein, 13 aa, Homo sapiens
SENSLQRSKTTRR

SEQ ID NO: 2076 - protein, 13 aa, Homo sapiens
SGRCEDCNSHMSI

SEQ ID NO: 2077 - protein, 13 aa, Homo sapiens
SLKLILAKFRPKK

SEQ ID NO: 2078 - protein, 13 aa, Homo sapiens
SLPEILSRSLWKR

SEQ ID NO: 2079 - protein, 13 aa, Homo sapiens
SPIWKIFQEPKTC

SEQ ID NO: 2080 - protein, 13 aa, Homo sapiens
SRIKMYNICSGFN

SEQ ID NO: 2081 - protein, 13 aa, Homo sapiens
SRRRTKKTSSCVS

SEQ ID NO: 2082 - protein, 13 aa, Homo sapiens
SRSPASWTKGIGR

SEQ ID NO: 2083 - protein, 13 aa, Homo sapiens
SSCLLLASCLSNL

SEQ ID NO: 2084 - protein, 13 aa, Homo sapiens
SYKREFPFQQPLA

SEQ ID NO: 2085 - protein, 13 aa, Homo sapiens
TAQEIQKCYFRHI

SEQ ID NO: 2086 - protein, 13 aa, Homo sapiens
TDYQEIFMSQSYH

SEQ ID NO: 2087 - protein, 13 aa, Homo sapiens
TGPRKNRSGKKWK

SEQ ID NO: 2088 - protein, 13 aa, Homo sapiens
TKPKWAFSLDWLR

SEQ ID NO: 2089 - protein, 13 aa, Homo sapiens
TKSSAACLWSEKD

SEQ ID NO: 2090 - protein, 13 aa, Homo sapiens
TMFRRIGQARKKI

SEQ ID NO: 2091 - protein, 13 aa, Homo sapiens
TPGMHHSLILKSI

SEQ ID NO: 2092 - protein, 13 aa, Homo sapiens
TYEDPYWKEDLPM

SEQ ID NO: 2093 - protein, 13 aa, Homo sapiens
TYNASTQEQNKLS

SEQ ID NO: 2094 - protein, 13 aa, Homo sapiens
VLFGCPVNKTGSG

SEQ ID NO: 2095 - protein, 13 aa, Homo sapiens
VLKKKHQMRKKMK

SEQ ID NO: 2096 - protein, 13 aa, Homo sapiens
VRWGNAKNTASLL

SEQ ID NO: 2097 - protein, 13 aa, Homo sapiens
VTFQTPEAAPLRP

SEQ ID NO: 2098 - protein, 13 aa, Homo sapiens
WGIWPALLGECLH

SEQ ID NO: 2099 - protein, 13 aa, Homo sapiens
WQQSCSSSLWTSC

SEQ ID NO: 2100 - protein, 13 aa, Homo sapiens
WVSSLTVHREDKG

SEQ ID NO: 2101 - protein, 13 aa, Homo sapiens
WWRRKYLEFTSYL

SEQ ID NO: 2102 - protein, 13 aa, Homo sapiens
YCSVLNVIKHLTE

SEQ ID NO: 2103 - protein, 13 aa, Homo sapiens
YGSKYERVDFTIC

SEQ ID NO: 2104-2105 - skipped (2 entries)

SEQ ID NO: 2106 - protein, 13 aa, Homo sapiens
YLVTLGWNTVKNI

SEQ ID NO: 2107 - protein, 13 aa, Homo sapiens
YWRKWRNQMPTTS

SEQ ID NO: 2108 - protein, 12 aa, Homo sapiens
AHNQILMMLEGL

SEQ ID NO: 2109 - skipped

SEQ ID NO: 2110 - protein, 12 aa, Homo sapiens
ASERGSKGAVWG

SEQ ID NO: 2111 - protein, 12 aa, Homo sapiens
CIELNILISWRI

SEQ ID NO: 2112 - protein, 12 aa, Homo sapiens
DDPTWHCLRNVA

SEQ ID NO: 2113-2114 - skipped (2 entries)

SEQ ID NO: 2115 - protein, 12 aa, Homo sapiens
DLLLKNYYSILL

SEQ ID NO: 2116 - protein, 12 aa, Homo sapiens
DQSSRWEKSKDG

SEQ ID NO: 2117 - protein, 12 aa, Homo sapiens
EHSQRLYLQTRF

SEQ ID NO: 2118 - protein, 12 aa, Homo sapiens
EITHHPPVWAAL

SEQ ID NO: 2119 - protein, 12 aa, Homo sapiens
ERRRQPRRKKAN

SEQ ID NO: 2120 - protein, 12 aa, Homo sapiens
FNSAKSDCILQR

SEQ ID NO: 2121 - protein, 12 aa, Homo sapiens
FPLYSLLLVQRI

SEQ ID NO: 2122 - protein, 12 aa, Homo sapiens
FSYFLLHLCWFG

SEQ ID NO: 2123 - skipped

SEQ ID NO: 2124 - protein, 12 aa, Homo sapiens
GLIFLTTIFISV

SEQ ID NO: 2125 - protein, 12 aa, Homo sapiens
GLPQKELKGIQL

SEQ ID NO: 2126 - protein, 12 aa, Homo sapiens
GPQSYSMDCDHS

SEQ ID NO: 2127 - protein, 12 aa, Homo sapiens
GSQAYSPSIKNK

SEQ ID NO: 2128 - protein, 12 aa, Homo sapiens
GSRTSSKIKKGG

SEQ ID NO: 2129 - skipped

SEQ ID NO: 2130 - protein, 12 aa, Homo sapiens
HINRLRSVCHLI

SEQ ID NO: 2131 - protein, 12 aa, Homo sapiens
HLGRLYLLLKQE

SEQ ID NO: 2132 - protein, 12 aa, Homo sapiens
HRQKFVGKGGTL

SEQ ID NO: 2133 - protein, 12 aa, Homo sapiens
IARERLFSLLQG

SEQ ID NO: 2134 - protein, 12 aa, Homo sapiens
ICKSGKDTWRHH

SEQ ID NO: 2135 - protein, 12 aa, Homo sapiens
IFRIRPMAKMMM

SEQ ID NO: 2136 - protein, 12 aa, Homo sapiens
IGYLTGFCSPNA

SEQ ID NO: 2137 - skipped

SEQ ID NO: 2138 - protein, 12 aa, Homo sapiens
ILLSLLCRYYPV

SEQ ID NO: 2139 - protein, 12 aa, Homo sapiens
IWRHSRVCPGLY

SEQ ID NO: 2140 - skipped

SEQ ID NO: 2141 - protein, 12 aa, Homo sapiens
KLFRKYCHQLVL

SEQ ID NO: 2142 - skipped

SEQ ID NO: 2143 - protein, 12 aa, Homo sapiens
KNRKRSGSGNFK

SEQ ID NO: 2144 - protein, 12 aa, Homo sapiens
KQGAFSSSSWEV

SEQ ID NO: 2145 - protein, 12 aa, Homo sapiens
KSKGNPGKKEAT

SEQ ID NO: 2146 - protein, 12 aa, Homo sapiens
KSQKTLLWMKKP

SEQ ID NO: 2147 - protein, 12 aa, Homo sapiens
KTEKEKRKEEIW

SEQ ID NO: 2148 - protein, 12 aa, Homo sapiens
KTILVFTIWARE

SEQ ID NO: 2149 - protein, 12 aa, Homo sapiens
KTQHPPMVSCDG

SEQ ID NO: 2150 - protein, 12 aa, Homo sapiens
LCLHSKMTETDY

SEQ ID NO: 2151 - protein, 12 aa, Homo sapiens
LFHSASQEISQT

SEQ ID NO: 2152 - protein, 12 aa, Homo sapiens
LFSDKINPSGGL

SEQ ID NO: 2153 - protein, 12 aa, Homo sapiens
LGGDMRFLHFSY

SEQ ID NO: 2154 - protein, 12 aa, Homo sapiens
LKKEAVVRSFKS

SEQ ID NO: 2155 - protein, 12 aa, Homo sapiens
LKKTPSLQTHQS

SEQ ID NO: 2156 - protein, 12 aa, Homo sapiens
LLKIPRTLKIRI

SEQ ID NO: 2157 - protein, 12 aa, Homo sapiens
LLWLADCVGVTR

SEQ ID NO: 2158 - protein, 12 aa, Homo sapiens
LNRLPQRRTMKI

SEQ ID NO: 2159 - protein, 12 aa, Homo sapiens
LPQSMCFTASQL

SEQ ID NO: 2160 - protein, 12 aa, Homo sapiens
LQKSWFIQHWSV

SEQ ID NO: 2161 - protein, 12 aa, Homo sapiens
LRKRKLPQKLNA

SEQ ID NO: 2162 - protein, 12 aa, Homo sapiens
LSQLRPRLSLYS

SEQ ID NO: 2163 - skipped

SEQ ID NO: 2164 - protein, 12 aa, Homo sapiens
MIYLLLKLMHPI

SEQ ID NO: 2165 - protein, 12 aa, Homo sapiens
NAFTIEAEGRGE

SEQ ID NO: 2166 - protein, 12 aa, Homo sapiens
NCRSGKHFFQML

SEQ ID NO: 2167 - protein, 12 aa, Homo sapiens
NCSEPASSEVLA

SEQ ID NO: 2168 - protein, 12 aa, Homo sapiens
NEVFLQKQRGFH

SEQ ID NO: 2169 - protein, 12 aa, Homo sapiens
NGEVTGWRRWDK

SEQ ID NO: 2170 - protein, 12 aa, Homo sapiens
NKANAGDGGAGQ

SEQ ID NO: 2171 - protein, 12 aa, Homo sapiens
NKKYHLYVPTHN

SEQ ID NO: 2172 - protein, 12 aa, Homo sapiens
NKPEKIPSCHRW

SEQ ID NO: 2173 - skipped

SEQ ID NO: 2174 - protein, 12 aa, Homo sapiens
NPRWLEPLSSSL

SEQ ID NO: 2175 - protein, 12 aa, Homo sapiens
NQIRSHEQLSCQ

SEQ ID NO: 2176 - protein, 12 aa, Homo sapiens
NQWRFCGRDARR

SEQ ID NO: 2177 - protein, 12 aa, Homo sapiens
NSCTENYRKKGG

SEQ ID NO: 2178 - protein, 12 aa, Homo sapiens
NSTKPATSKSHL

SEQ ID NO: 2179 - protein, 12 aa, Homo sapiens
NTFPRDTEWTLE

SEQ ID NO: 2180 - protein, 12 aa, Homo sapiens
NTYEMPKDFIWH

SEQ ID NO: 2181 - protein, 12 aa, Homo sapiens
NVAKITTTENVF

SEQ ID NO: 2182 - protein, 12 aa, Homo sapiens
PFSVQMTSGSMG

SEQ ID NO: 2183 - skipped

SEQ ID NO: 2184 - protein, 12 aa, Homo sapiens
PNQREEDLETPG

SEQ ID NO: 2185 - protein, 12 aa, Homo sapiens
PSRTRRAFCRRR

SEQ ID NO: 2186 - protein, 12 aa, Homo sapiens
PVLPPETHIVDG

SEQ ID NO: 2187 - protein, 12 aa, Homo sapiens
QDVMSFSYRNLF

SEQ ID NO: 2188 - protein, 12 aa, Homo sapiens
QFLPGLPFLPAS

SEQ ID NO: 2189 - protein, 12 aa, Homo sapiens
QKQCIRFCHQIL

SEQ ID NO: 2190 - protein, 12 aa, Homo sapiens
QLDGSPYFSSLS

SEQ ID NO: 2191 - protein, 12 aa, Homo sapiens
QLMSKLIIGTTQ

SEQ ID NO: 2192 - protein, 12 aa, Homo sapiens
QNLNHPCQSEAF

SEQ ID NO: 2193 - protein, 12 aa, Homo sapiens
QNLTLRITDTRL

SEQ ID NO: 2194 - protein, 12 aa, Homo sapiens
QNLVRSTGDAGH

SEQ ID NO: 2195 - protein, 12 aa, Homo sapiens
QRKFKENTGTTK

SEQ ID NO: 2196 - protein, 12 aa, Homo sapiens
QRRFFCSKESPQ

SEQ ID NO: 2197 - protein, 12 aa, Homo sapiens
QSPSWKRKAKTP

SEQ ID NO: 2198 - protein, 12 aa, Homo sapiens
QVGECQKHSKPF

SEQ ID NO: 2199 - protein, 12 aa, Homo sapiens
QWKQKLSNLLLL

SEQ ID NO: 2200 - protein, 12 aa, Homo sapiens
RAFDHFQRGHQR

SEQ ID NO: 2201 - protein, 12 aa, Homo sapiens
RFEVVLGTFHLM

SEQ ID NO: 2202 - protein, 12 aa, Homo sapiens
RFHSVQSRSGWR

SEQ ID NO: 2203 - protein, 12 aa, Homo sapiens
RHTSKEQGSWAI

SEQ ID NO: 2204 - protein, 12 aa, Homo sapiens
RITFSRKIETNF

SEQ ID NO: 2205 - protein, 12 aa, Homo sapiens
RKRRRRKRKRAN

SEQ ID NO: 2206 - protein, 12 aa, Homo sapiens
RLYQKVDRTQTT

SEQ ID NO: 2207 - protein, 12 aa, Homo sapiens
RRLQFFVIPFAI

SEQ ID NO: 2208 - protein, 12 aa, Homo sapiens
RRYTKRNSLLLK

SEQ ID NO: 2209 - protein, 12 aa, Homo sapiens
RSQSKQVWRYLG

SEQ ID NO: 2210 - protein, 12 aa, Homo sapiens
SGTKSSRKSMNS

SEQ ID NO: 2211 - protein, 12 aa, Homo sapiens
SKEWLRNLFHPK

SEQ ID NO: 2212 - protein, 12 aa, Homo sapiens
SLREKKKISLGF

SEQ ID NO: 2213 - protein, 12 aa, Homo sapiens
SNNTDLKLAFKY

SEQ ID NO: 2214 - protein, 12 aa, Homo sapiens
SRPCKHPFSLSV

SEQ ID NO: 2215 - protein, 12 aa, Homo sapiens
SSASAFSRSLHF

SEQ ID NO: 2216 - protein, 12 aa, Homo sapiens
SSEGKQPVIFYQ

SEQ ID NO: 2217 - protein, 12 aa, Homo sapiens
SWPSLSVLGVKN

SEQ ID NO: 2218 - protein, 12 aa, Homo sapiens
TGPGQPLSHWRL

SEQ ID NO: 2219 - protein, 12 aa, Homo sapiens
TGSQVQEAGEAM

SEQ ID NO: 2220 - protein, 12 aa, Homo sapiens
TKQVGREFLVHK

SEQ ID NO: 2221 - protein, 12 aa, Homo sapiens
TKRATTEDLQEA

SEQ ID NO: 2222 - protein, 12 aa, Homo sapiens
TPISSSHTVFWK

SEQ ID NO: 2223 - protein, 12 aa, Homo sapiens
TTNAEGICSKNY

SEQ ID NO: 2224 - protein, 12 aa, Homo sapiens
TTYNNSNSWSTD

SEQ ID NO: 2225 - protein, 12 aa, Homo sapiens
TVYCSECQLQRH

SEQ ID NO: 2226 - protein, 12 aa, Homo sapiens
VKAMALKTTTKI

SEQ ID NO: 2227 - protein, 12 aa, Homo sapiens
VTGQKDTSWHPL

SEQ ID NO: 2228 - protein, 12 aa, Homo sapiens
WDHHLHHSGCRE

SEQ ID NO: 2229 - protein, 12 aa, Homo sapiens
WISAVPHRKLQH

SEQ ID NO: 2230 - protein, 12 aa, Homo sapiens
WRCKNFLDGARR

SEQ ID NO: 2231 - skipped

SEQ ID NO: 2232 - protein, 12 aa, Homo sapiens
YILERNYRTGMC

SEQ ID NO: 2233 - protein, 12 aa, Homo sapiens
YLNWVFQKKLRR

SEQ ID NO: 2234 - protein, 12 aa, Homo sapiens
YSKQCFRFFQGK

SEQ ID NO: 2235 - protein, 11 aa, Homo sapiens
AERRKRSSREG

SEQ ID NO: 2236 - skipped

SEQ ID NO: 2237 - protein, 11 aa, Homo sapiens
AKPLTHVVFAW

SEQ ID NO: 2238 - protein, 11 aa, Homo sapiens
AKTCPQSGTSS

SEQ ID NO: 2239 - protein, 11 aa, Homo sapiens
ALHLPWYLHLQ

SEQ ID NO: 2240 - skipped

SEQ ID NO: 2241 - protein, 11 aa, Homo sapiens
APRGRALWPRR

SEQ ID NO: 2242 - protein, 11 aa, Homo sapiens
ASLNVLLIHQF

SEQ ID NO: 2243 - protein, 11 aa, Homo sapiens
CIMDWTRKISD

SEQ ID NO: 2244 - protein, 11 aa, Homo sapiens
CKHIFRTWKNS

SEQ ID NO: 2245 - protein, 11 aa, Homo sapiens
CQLIENVPLLL

SEQ ID NO: 2246 - protein, 11 aa, Homo sapiens
CQQTTSCKLSS

SEQ ID NO: 2247 - protein, 11 aa, Homo sapiens
CRLFYKDMLQE

SEQ ID NO: 2248 - protein, 11 aa, Homo sapiens
CTTIVLALKKD

SEQ ID NO: 2249 - protein, 11 aa, Homo sapiens
DEQDHGHPKAR

SEQ ID NO: 2250 - protein, 11 aa, Homo sapiens
DRKSTSFRSNC

SEQ ID NO: 2251 - protein, 11 aa, Homo sapiens
DSPSLTTFWNN

SEQ ID NO: 2252 - protein, 11 aa, Homo sapiens
DTQIPRTSRWC

SEQ ID NO: 2253 - protein, 11 aa, Homo sapiens
EAFTLTMVGFS

SEQ ID NO: 2254 - protein, 11 aa, Homo sapiens
ECIWPQMTLLY

SEQ ID NO: 2255 - protein, 11 aa, Homo sapiens
EEKKGKAFFYT

SEQ ID NO: 2256 - protein, 11 aa, Homo sapiens
EERKRGIATGI

SEQ ID NO: 2257 - protein, 11 aa, Homo sapiens
EESETTQDFDH

SEQ ID NO: 2258 - protein, 11 aa, Homo sapiens
EGEKRKSPQTR

SEQ ID NO: 2259 - protein, 11 aa, Homo sapiens
EIKTLKYPLRK

SEQ ID NO: 2260 - protein, 11 aa, Homo sapiens
EKEKRKEEQVR

SEQ ID NO: 2261 - protein, 11 aa, Homo sapiens
EKQRKKKNVSE

SEQ ID NO: 2262 - protein, 11 aa, Homo sapiens
FQKRWLLLVQE

SEQ ID NO: 2263 - protein, 11 aa, Homo sapiens
FSFYTVNILYI

SEQ ID NO: 2264 - protein, 11 aa, Homo sapiens
FTLLSTVNHWE

SEQ ID NO: 2265 - protein, 11 aa, Homo sapiens
FYTWTNQYLQN

SEQ ID NO: 2266 - protein, 11 aa, Homo sapiens
GDQEKNKSMQT

SEQ ID NO: 2267 - protein, 11 aa, Homo sapiens
GFVEVAFWRLH

SEQ ID NO: 2268 - protein, 11 aa, Homo sapiens
GPHFMRTSLRQ

SEQ ID NO: 2269 - protein, 11 aa, Homo sapiens
HQDDTVFWTQF

SEQ ID NO: 2270 - protein, 11 aa, Homo sapiens
HYLSCFYSYTL

SEQ ID NO: 2271 - protein, 11 aa, Homo sapiens
IDLCHRSFYGN

SEQ ID NO: 2272 - protein, 11 aa, Homo sapiens
IEVSRGNLSLQ

SEQ ID NO: 2273 - protein, 11 aa, Homo sapiens
IKQVISPGKGT

SEQ ID NO: 2274 - protein, 11 aa, Homo sapiens
ILSFLPIKSGI

SEQ ID NO: 2275 - protein, 11 aa, Homo sapiens
INQRKGWTQRE

SEQ ID NO: 2276 - protein, 11 aa, Homo sapiens
IRCWPHYQDVI

SEQ ID NO: 2277 - protein, 11 aa, Homo sapiens
IRSKGDYKITG

SEQ ID NO: 2278 - protein, 11 aa, Homo sapiens
ISLKKKIITVL

SEQ ID NO: 2279 - protein, 11 aa, Homo sapiens
IYRGPGYKDHR

SEQ ID NO: 2280 - protein, 11 aa, Homo sapiens
KARKEEECRRC

SEQ ID NO: 2281 - protein, 11 aa, Homo sapiens
KEDCRNFKCYH

SEQ ID NO: 2282 - protein, 11 aa, Homo sapiens
KIINLNTATGL

SEQ ID NO: 2283 - protein, 11 aa, Homo sapiens
KKATGSINRTG

SEQ ID NO: 2284 - protein, 11 aa, Homo sapiens
KKNQILLRDYR

SEQ ID NO: 2285 - protein, 11 aa, Homo sapiens
KKRGGHQETSV

SEQ ID NO: 2286 - protein, 11 aa, Homo sapiens
KLFSSKRKKKK

SEQ ID NO: 2287 - protein, 11 aa, Homo sapiens
KMVLILLKVLH

SEQ ID NO: 2288 - protein, 11 aa, Homo sapiens
KQICTRSENQH

SEQ ID NO: 2289 - protein, 11 aa, Homo sapiens
KQTASFHQAFS

SEQ ID NO: 2290 - skipped

SEQ ID NO: 2291 - protein, 11 aa, Homo sapiens
KRNGGESTETI

SEQ ID NO: 2292 - protein, 11 aa, Homo sapiens
KSKLPTMLTQA

SEQ ID NO: 2293 - protein, 11 aa, Homo sapiens
KTGENKEQSQM

SEQ ID NO: 2294 - protein, 11 aa, Homo sapiens
LDCMFRRRGMD

SEQ ID NO: 2295 - protein, 11 aa, Homo sapiens
LGLNMKRNSKP

SEQ ID NO: 2296 - protein, 11 aa, Homo sapiens
LGRSWLLPKTE

SEQ ID NO: 2297 - protein, 11 aa, Homo sapiens
LIEEFTHLCSL

SEQ ID NO: 2298 - protein, 11 aa, Homo sapiens
LILEEKVVIKG

SEQ ID NO: 2299 - protein, 11 aa, Homo sapiens
LISHLMKWAHP

SEQ ID NO: 2300 - protein, 11 aa, Homo sapiens
LKITYRVWLHD

SEQ ID NO: 2301 - protein, 11 aa, Homo sapiens
LKTLCGSTGWP

SEQ ID NO: 2302 - protein, 11 aa, Homo sapiens
LKTTTRLMKRA

SEQ ID NO: 2303 - protein, 11 aa, Homo sapiens
LLFLPTRKFPL

SEQ ID NO: 2304 - protein, 11 aa, Homo sapiens
LLMRDPHKEKK

SEQ ID NO: 2305 - protein, 11 aa, Homo sapiens
LMKKMMKSVRL

SEQ ID NO: 2306 - protein, 11 aa, Homo sapiens
LNKFSNCLKKS

SEQ ID NO: 2307 - protein, 11 aa, Homo sapiens
LPNLKHCLMMS

SEQ ID NO: 2308 - protein, 11 aa, Homo sapiens
LPPMIPFVCWE

SEQ ID NO: 2309 - protein, 11 aa, Homo sapiens
LPRFYIYLAWM

SEQ ID NO: 2310 - protein, 11 aa, Homo sapiens
LSNIRARQEGN

SEQ ID NO: 2311 - protein, 11 aa, Homo sapiens
LSSERKRESKS

SEQ ID NO: 2312 - protein, 11 aa, Homo sapiens
LTHPLKMYLEK

SEQ ID NO: 2313 - protein, 11 aa, Homo sapiens
MCKCHHQRFAP

SEQ ID NO: 2314 - protein, 11 aa, Homo sapiens
MGCPGNQAGGD

SEQ ID NO: 2315 - protein, 11 aa, Homo sapiens
MGYQRRKKCHN

SEQ ID NO: 2316 - skipped

SEQ ID NO: 2317 - protein, 11 aa, Homo sapiens
MQLLTENLQLA

SEQ ID NO: 2318 - protein, 11 aa, Homo sapiens
MVKMLVFILKL

SEQ ID NO: 2319 - protein, 11 aa, Homo sapiens
NAEDITKCPDL

SEQ ID NO: 2320 - protein, 11 aa, Homo sapiens
NAKLVSILVRR

SEQ ID NO: 2321 - protein, 11 aa, Homo sapiens
NAQKLWKLKPV

SEQ ID NO: 2322 - skipped

SEQ ID NO: 2323 - protein, 11 aa, Homo sapiens
NCLGTRSQNAK

SEQ ID NO: 2324 - protein, 11 aa, Homo sapiens
NFCWWPFSRYT

SEQ ID NO: 2325 - protein, 11 aa, Homo sapiens
NGPDLRKGKRR

SEQ ID NO: 2326 - protein, 11 aa, Homo sapiens
NHTCAGEGPVS

SEQ ID NO: 2327 - protein, 11 aa, Homo sapiens
NIPSTKACTTA

SEQ ID NO: 2328 - protein, 11 aa, Homo sapiens
NKPVNSSCQII

SEQ ID NO: 2329 - protein, 11 aa, Homo sapiens
NPYWTKTLWMF

SEQ ID NO: 2330 - protein, 11 aa, Homo sapiens
NQEKIAGSLGI

SEQ ID NO: 2331 - protein, 11 aa, Homo sapiens
NQGVPSVFSSL

SEQ ID NO: 2332 - protein, 11 aa, Homo sapiens
NQRSTDEGRRL

SEQ ID NO: 2333 - protein, 11 aa, Homo sapiens
NRLGRARQEQG

SEQ ID NO: 2334 - skipped

SEQ ID NO: 2335 - protein, 11 aa, Homo sapiens
NRRRASKKESN

SEQ ID NO: 2336 - protein, 11 aa, Homo sapiens
NSNRWSAGHKP

SEQ ID NO: 2337 - protein, 11 aa, Homo sapiens
NSPYLLYGRLG

SEQ ID NO: 2338 - protein, 11 aa, Homo sapiens
NVECAGHSGGF

SEQ ID NO: 2339 - protein, 11 aa, Homo sapiens
NVHKDRLLCLI

SEQ ID NO: 2340 - protein, 11 aa, Homo sapiens
NYGCQEWPDNE

SEQ ID NO: 2341 - protein, 11 aa, Homo sapiens
NYKNSGSKPGR

SEQ ID NO: 2342 - protein, 11 aa, Homo sapiens
NYNKSSKEKSV

SEQ ID NO: 2343 - protein, 11 aa, Homo sapiens
NYRINFKVPLL

SEQ ID NO: 2344 - protein, 11 aa, Homo sapiens
PGITEPSTCLL

SEQ ID NO: 2345 - protein, 11 aa, Homo sapiens
PLVHQKGFRVL

SEQ ID NO: 2346 - protein, 11 aa, Homo sapiens
PRLKKKSIQKI

SEQ ID NO: 2347 - protein, 11 aa, Homo sapiens
PTGSPAEVITK

SEQ ID NO: 2348 - protein, 11 aa, Homo sapiens
PTYVYHKQKEY

SEQ ID NO: 2349 - protein, 11 aa, Homo sapiens
PWSGTLEKEIV

SEQ ID NO: 2350 - protein, 11 aa, Homo sapiens
QALRLQSLRRD

SEQ ID NO: 2351 - protein, 11 aa, Homo sapiens
QEHTKFAQSDM

SEQ ID NO: 2352 - protein, 11 aa, Homo sapiens
QFLKERKTVDR

SEQ ID NO: 2353 - protein, 11 aa, Homo sapiens
QKNSLKFSMIE

SEQ ID NO: 2354 - protein, 11 aa, Homo sapiens
QKPCSPADSEA

SEQ ID NO: 2355 - protein, 11 aa, Homo sapiens
RKLAFPQFSSC

SEQ ID NO: 2356 - protein, 11 aa, Homo sapiens
RKQKSSEQSNT

SEQ ID NO: 2357 - protein, 11 aa, Homo sapiens
RKTPCKCQVHR

SEQ ID NO: 2358 - protein, 11 aa, Homo sapiens
RLVHTPKRRRL

SEQ ID NO: 2359 - protein, 11 aa, Homo sapiens
RNQCARNKNCY

SEQ ID NO: 2360 - protein, 11 aa, Homo sapiens
RQTAFEKEKRI

SEQ ID NO: 2361 - protein, 11 aa, Homo sapiens
RRKCCWFSDTT

SEQ ID NO: 2362 - protein, 11 aa, Homo sapiens
RRRLSKTKLSV

SEQ ID NO: 2363 - protein, 11 aa, Homo sapiens
RRSKKCGRITY

SEQ ID NO: 2364 - protein, 11 aa, Homo sapiens
RSSRKGTRTCV

SEQ ID NO: 2365 - protein, 11 aa, Homo sapiens
RVHTFLQLQST

SEQ ID NO: 2366 - protein, 11 aa, Homo sapiens
RWSPAYDWLFS

SEQ ID NO: 2367 - protein, 11 aa, Homo sapiens
SEKCRSSLDWR

SEQ ID NO: 2368 - protein, 11 aa, Homo sapiens
SESCGRKWRRS

SEQ ID NO: 2369 - protein, 11 aa, Homo sapiens
SKECRSSLGWR

SEQ ID NO: 2370 - protein, 11 aa, Homo sapiens
SLTKRQKRIIV

SEQ ID NO: 2371 - protein, 11 aa, Homo sapiens
SNFRKTVVLPG

SEQ ID NO: 2372 - protein, 11 aa, Homo sapiens
SNLCWERRKFT

SEQ ID NO: 2373 - protein, 11 aa, Homo sapiens
SNRLSCPQRSC

SEQ ID NO: 2374 - protein, 11 aa, Homo sapiens
SQALMLGSFMP

SEQ ID NO: 2375 - protein, 11 aa, Homo sapiens
SSSRKTDSEKR

SEQ ID NO: 2376 - protein, 11 aa, Homo sapiens
STLPPSIQQIW

SEQ ID NO: 2377 - protein, 11 aa, Homo sapiens
SVMSIFQVQPP

SEQ ID NO: 2378 - protein, 11 aa, Homo sapiens
TAVSSLASRAW

SEQ ID NO: 2379 - protein, 11 aa, Homo sapiens
TFQMYRMWQSF

SEQ ID NO: 2380 - protein, 11 aa, Homo sapiens
TGSKWCLALFI

SEQ ID NO: 2381 - protein, 11 aa, Homo sapiens
TIHIRSQYSAV

SEQ ID NO: 2382 - protein, 11 aa, Homo sapiens
TKEEKEERASK

SEQ ID NO: 2383 - protein, 11 aa, Homo sapiens
TLNQSPEHATR

SEQ ID NO: 2384 - protein, 11 aa, Homo sapiens
TNNTLVPDGFL

SEQ ID NO: 2385 - protein, 11 aa, Homo sapiens
TRGCCSLPRKN

SEQ ID NO: 2386 - protein, 11 aa, Homo sapiens
TRSFETFSETS

SEQ ID NO: 2387 - protein, 11 aa, Homo sapiens
TSDNPFRRQTV

SEQ ID NO: 2388 - protein, 11 aa, Homo sapiens
TSDNPLRRETM

SEQ ID NO: 2389 - protein, 11 aa, Homo sapiens
TSDNSLRRETM

SEQ ID NO: 2390 - protein, 11 aa, Homo sapiens
VGRQGKRSSEC

SEQ ID NO: 2391 - protein, 11 aa, Homo sapiens
VIHFKKSKIIW

SEQ ID NO: 2392 - protein, 11 aa, Homo sapiens
VKGLPRPLKFC

SEQ ID NO: 2393 - skipped

SEQ ID NO: 2394 - protein, 11 aa, Homo sapiens
VKPTLWEEGTS

SEQ ID NO: 2395 - protein, 11 aa, Homo sapiens
VLLLISRIQKG

SEQ ID NO: 2396 - protein, 11 aa, Homo sapiens
VLNLCLLPFLK

SEQ ID NO: 2397 - protein, 11 aa, Homo sapiens
VLPQSSVACPG

SEQ ID NO: 2398 - protein, 11 aa, Homo sapiens
VVCRLATSHKF

SEQ ID NO: 2399 - protein, 11 aa, Homo sapiens
VWTQVECVRSI

SEQ ID NO: 2400 - protein, 11 aa, Homo sapiens
WKIFRSWGIIP

SEQ ID NO: 2401 - protein, 11 aa, Homo sapiens
WKPSTRSWRSD

SEQ ID NO: 2402 - protein, 11 aa, Homo sapiens
YPVLTTLQFQG

SEQ ID NO: 2403 - protein, 11 aa, Homo sapiens
YYFTLSSTYFA

SEQ ID NO: 2404 - protein, 10 aa, Homo sapiens
AERMRPKVQS

SEQ ID NO: 2405 - protein, 10 aa, Homo sapiens
AGTHPQKKTA

SEQ ID NO: 2406 - protein, 10 aa, Homo sapiens
AQDVEPNHFR

SEQ ID NO: 2407 - protein, 10 aa, Homo sapiens
AQPGSGLETC

SEQ ID NO: 2408 - protein, 10 aa, Homo sapiens
ASVRKHIVGT

SEQ ID NO: 2409 - protein, 10 aa, Homo sapiens
ATPRRKKANP

SEQ ID NO: 2410 - protein, 10 aa, Homo sapiens
AYLMYMLPSG

SEQ ID NO: 2411 - protein, 10 aa, Homo sapiens
CFQNPLSLLH

SEQ ID NO: 2412 - protein, 10 aa, Homo sapiens
CKVIWGLGSQ

SEQ ID NO: 2413 - protein, 10 aa, Homo sapiens
CVQEIMQTGL

SEQ ID NO: 2414 - protein, 10 aa, Homo sapiens
EERGTSESRS

SEQ ID NO: 2415 - protein, 10 aa, Homo sapiens
EFKARCQDNR

SEQ ID NO: 2416 - protein, 10 aa, Homo sapiens
EGNLIQNRSF

SEQ ID NO: 2417 - protein, 10 aa, Homo sapiens
EGRPGENQSP

SEQ ID NO: 2418 - protein, 10 aa, Homo sapiens
EGWKRRLSKK

SEQ ID NO: 2419 - protein, 10 aa, Homo sapiens
EHNRGYSYVR

SEQ ID NO: 2420 - protein, 10 aa, Homo sapiens
EKILIQLKML

SEQ ID NO: 2421 - protein, 10 aa, Homo sapiens
EKNVQKQNTT

SEQ ID NO: 2422 - protein, 10 aa, Homo sapiens
EVSSRARDNV

SEQ ID NO: 2423 - protein, 10 aa, Homo sapiens
FFWLEPLMAS

SEQ ID NO: 2424 - protein, 10 aa, Homo sapiens
FLGTNETYRN

SEQ ID NO: 2425 - protein, 10 aa, Homo sapiens
FLKMEPVSHF

SEQ ID NO: 2426 - protein, 10 aa, Homo sapiens
FLVTVGGTLR

SEQ ID NO: 2427 - protein, 10 aa, Homo sapiens
FMHLNKGGSS

SEQ ID NO: 2428 - protein, 10 aa, Homo sapiens
FVSKKRKKWN

SEQ ID NO: 2429 - protein, 10 aa, Homo sapiens
FWGPGFKIWT

SEQ ID NO: 2430 - protein, 10 aa, Homo sapiens
GFFPHCPQRR

SEQ ID NO: 2431 - protein, 10 aa, Homo sapiens
GKGCERSKGG

SEQ ID NO: 2432 - protein, 10 aa, Homo sapiens
GKREKRPWSL

SEQ ID NO: 2433 - protein, 10 aa, Homo sapiens
GNSNLTGKTH

SEQ ID NO: 2434 - protein, 10 aa, Homo sapiens
GRAFPRNQQN

SEQ ID NO: 2435 - protein, 10 aa, Homo sapiens
GSTDSHRGGQ

SEQ ID NO: 2436 - protein, 10 aa, Homo sapiens
GTRWLSQYTV

SEQ ID NO: 2437 - protein, 10 aa, Homo sapiens
HERCKRQIGK

SEQ ID NO: 2438 - protein, 10 aa, Homo sapiens
HPIRTSLKMN

SEQ ID NO: 2439 - protein, 10 aa, Homo sapiens
HQRTSTCHTL

SEQ ID NO: 2440 - protein, 10 aa, Homo sapiens
HQSEPTKCAM

SEQ ID NO: 2441 - protein, 10 aa, Homo sapiens
HWKRNPKAIW

SEQ ID NO: 2442 - protein, 10 aa, Homo sapiens
IQSLMDCWQI

SEQ ID NO: 2443 - protein, 10 aa, Homo sapiens
IRAKVIPVKF

SEQ ID NO: 2444 - protein, 10 aa, Homo sapiens
IRRRYRREAI

SEQ ID NO: 2445 - protein, 10 aa, Homo sapiens
ISREEKYYSL

SEQ ID NO: 2446 - protein, 10 aa, Homo sapiens
ISTESPAPTR

SEQ ID NO: 2447 - protein, 10 aa, Homo sapiens
KALKRQMNIS

SEQ ID NO: 2448 - protein, 10 aa, Homo sapiens
KCKNTLGNSE

SEQ ID NO: 2449 - protein, 10 aa, Homo sapiens
KCMISIKKEV

SEQ ID NO: 2450 - protein, 10 aa, Homo sapiens
KCQRRWSFQH

SEQ ID NO: 2451 - protein, 10 aa, Homo sapiens
KEIRSFHPVF

SEQ ID NO: 2452 - protein, 10 aa, Homo sapiens
KEKYIHREKT

SEQ ID NO: 2453 - protein, 10 aa, Homo sapiens
KERTTCLSGI

SEQ ID NO: 2454 - protein, 10 aa, Homo sapiens
KGAYPNHRSA

SEQ ID NO: 2455 - protein, 10 aa, Homo sapiens
KIYKKKQFIA

SEQ ID NO: 2456 - protein, 10 aa, Homo sapiens
KLQKTEDYLC

SEQ ID NO: 2457 - protein, 10 aa, Homo sapiens
KLSRRRGQKL

SEQ ID NO: 2458 - protein, 10 aa, Homo sapiens
KQGSLWAGRR

SEQ ID NO: 2459 - protein, 10 aa, Homo sapiens
KQILIFHLLH

SEQ ID NO: 2460 - protein, 10 aa, Homo sapiens
KRIMFLNIFY

SEQ ID NO: 2461 - protein, 10 aa, Homo sapiens
KRIQVHKRRR

SEQ ID NO: 2462 - protein, 10 aa, Homo sapiens
KSIWTVDTYL

SEQ ID NO: 2463 - protein, 10 aa, Homo sapiens
KTEKETEGSC

SEQ ID NO: 2464 - protein, 10 aa, Homo sapiens
KTPFHRIFYL

SEQ ID NO: 2465 - protein, 10 aa, Homo sapiens
LEVCCYPLNN

SEQ ID NO: 2466 - protein, 10 aa, Homo sapiens
LHLLNLKNQV

SEQ ID NO: 2467 - protein, 10 aa, Homo sapiens
LIEIKVPSQK

SEQ ID NO: 2468 - protein, 10 aa, Homo sapiens
LIVCRKSFYS

SEQ ID NO: 2469 - protein, 10 aa, Homo sapiens
LKKNGIGYYY

SEQ ID NO: 2470 - protein, 10 aa, Homo sapiens
LKLRRNIPGI

SEQ ID NO: 2471 - protein, 10 aa, Homo sapiens
LKSWRSIDYF

SEQ ID NO: 2472 - protein, 10 aa, Homo sapiens
LNIEKENLHL

SEQ ID NO: 2473 - protein, 10 aa, Homo sapiens
LNQPKMNWHL

SEQ ID NO: 2474 - protein, 10 aa, Homo sapiens
LQHLTNIPER

SEQ ID NO: 2475 - protein, 10 aa, Homo sapiens
LRMLPLKQIA

SEQ ID NO: 2476 - protein, 10 aa, Homo sapiens
LRQKEIFTHP

SEQ ID NO: 2477 - protein, 10 aa, Homo sapiens
LSLKVLKKRG

SEQ ID NO: 2478 - protein, 10 aa, Homo sapiens
LSVQPQMGWK

SEQ ID NO: 2479 - protein, 10 aa, Homo sapiens
LVACPDLRRQ

SEQ ID NO: 2480 - protein, 10 aa, Homo sapiens
MRQNLQKHLS

SEQ ID NO: 2481 - protein, 10 aa, Homo sapiens
NAERAETSIL

SEQ ID NO: 2482 - protein, 10 aa, Homo sapiens
NCHKKCLFLC

SEQ ID NO: 2483 - protein, 10 aa, Homo sapiens
NEPRLYKECF

SEQ ID NO: 2484 - protein, 10 aa, Homo sapiens
NESKKWGNII

SEQ ID NO: 2485 - skipped

SEQ ID NO: 2486 - protein, 10 aa, Homo sapiens
NHQRPSRVSG

SEQ ID NO: 2487 - protein, 10 aa, Homo sapiens
NISGILRRKD

SEQ ID NO: 2488 - protein, 10 aa, Homo sapiens
NNHSNFLVST

SEQ ID NO: 2489 - protein, 10 aa, Homo sapiens
NNKLCKVLCP

SEQ ID NO: 2490 - protein, 10 aa, Homo sapiens
NNKLFQRGSL

SEQ ID NO: 2491 - protein, 10 aa, Homo sapiens
NQDTSGTWNL

SEQ ID NO: 2492 - protein, 10 aa, Homo sapiens
NQKCGSKPNT

SEQ ID NO: 2493 - protein, 10 aa, Homo sapiens
NRFCSSSSAA

SEQ ID NO: 2494 - protein, 10 aa, Homo sapiens
NRGSCYNPKA

SEQ ID NO: 2495 - protein, 10 aa, Homo sapiens
NRMPWQSTEI

SEQ ID NO: 2496 - skipped

SEQ ID NO: 2497 - protein, 10 aa, Homo sapiens
NSHWREPVWM

SEQ ID NO: 2498 - protein, 10 aa, Homo sapiens
NSYWRATLHM

SEQ ID NO: 2499 - protein, 10 aa, Homo sapiens
NSYWREILQM

SEQ ID NO: 2500 - protein, 10 aa, Homo sapiens
NSYWRETLQM

SEQ ID NO: 2501 - protein, 10 aa, Homo sapiens
NSYWRGTLQI

SEQ ID NO: 2502 - protein, 10 aa, Homo sapiens
NSYWRKTLQM

SEQ ID NO: 2503 - protein, 10 aa, Homo sapiens
NTSAVSWWIH

SEQ ID NO: 2504 - protein, 10 aa, Homo sapiens
NTSKTNKNKL

SEQ ID NO: 2505 - protein, 10 aa, Homo sapiens
NYQFTDCALQ

SEQ ID NO: 2506 - protein, 10 aa, Homo sapiens
PASGKPGEEQ

SEQ ID NO: 2507 - skipped

SEQ ID NO: 2508 - protein, 10 aa, Homo sapiens
PMEATRVECF

SEQ ID NO: 2509 - protein, 10 aa, Homo sapiens
PQRQGCSACV

SEQ ID NO: 2510 - protein, 10 aa, Homo sapiens
QEGWIQVISA

SEQ ID NO: 2511 - protein, 10 aa, Homo sapiens
QFTYQFFQTH

SEQ ID NO: 2512 - protein, 10 aa, Homo sapiens
QNNNWKKSAY

SEQ ID NO: 2513 - protein, 10 aa, Homo sapiens
QPVSPQKSGK

SEQ ID NO: 2514 - protein, 10 aa, Homo sapiens
QRENDWSPQH

SEQ ID NO: 2515 - protein, 10 aa, Homo sapiens
QRKETQRKAE

SEQ ID NO: 2516 - protein, 10 aa, Homo sapiens
QRTRRDSVFN

SEQ ID NO: 2517 - protein, 10 aa, Homo sapiens
QTRETMTPRA

SEQ ID NO: 2518 - protein, 10 aa, Homo sapiens
QTSQAVGSRL

SEQ ID NO: 2519 - protein, 10 aa, Homo sapiens
QWSLKHRRKQ

SEQ ID NO: 2520 - protein, 10 aa, Homo sapiens
RAAQNRQGNP

SEQ ID NO: 2521 - protein, 10 aa, Homo sapiens
RDYKNYGLED

SEQ ID NO: 2522 - protein, 10 aa, Homo sapiens
RKICRIPGGI

SEQ ID NO: 2523 - protein, 10 aa, Homo sapiens
RNSVFPFIYI

SEQ ID NO: 2524 - protein, 10 aa, Homo sapiens
RPVNSEGGSQ

SEQ ID NO: 2525 - protein, 10 aa, Homo sapiens
RRNEQNKNIS

SEQ ID NO: 2526 - protein, 10 aa, Homo sapiens
RSPCPFKNGG

SEQ ID NO: 2527 - protein, 10 aa, Homo sapiens
RTQHPWITPS

SEQ ID NO: 2528 - protein, 10 aa, Homo sapiens
RVFRQALFRR

SEQ ID NO: 2529 - protein, 10 aa, Homo sapiens
SAKKKRLLAV

SEQ ID NO: 2530 - protein, 10 aa, Homo sapiens
SAYHSAETPF

SEQ ID NO: 2531 - protein, 10 aa, Homo sapiens
SCSYFASASK

SEQ ID NO: 2532 - protein, 10 aa, Homo sapiens
SFNFIKENIN

SEQ ID NO: 2533 - protein, 10 aa, Homo sapiens
SGRCYNRNKY

SEQ ID NO: 2534 - protein, 10 aa, Homo sapiens
SILKQCCCLI

SEQ ID NO: 2535 - protein, 10 aa, Homo sapiens
SIQRCDAGEL

SEQ ID NO: 2536 - protein, 10 aa, Homo sapiens
SKAKKRLRKK

SEQ ID NO: 2537 - protein, 10 aa, Homo sapiens
SKHFIVKVQK

SEQ ID NO: 2538 - protein, 10 aa, Homo sapiens
SLCQKACVIL

SEQ ID NO: 2539 - protein, 10 aa, Homo sapiens
SLFLAASRAE

SEQ ID NO: 2540 - protein, 10 aa, Homo sapiens
SQLRKKWTAS

SEQ ID NO: 2541 - protein, 10 aa, Homo sapiens
SRVHMQTGER

SEQ ID NO: 2542 - protein, 10 aa, Homo sapiens
STTMMIMKKS

SEQ ID NO: 2543 - protein, 10 aa, Homo sapiens
SVFSVSVLKE

SEQ ID NO: 2544 - protein, 10 aa, Homo sapiens
TAERNKRQEK

SEQ ID NO: 2545 - protein, 10 aa, Homo sapiens
TEFTVQSIIL

SEQ ID NO: 2546 - skipped

SEQ ID NO: 2547 - protein, 10 aa, Homo sapiens
TFFYYWRKWG

SEQ ID NO: 2548 - protein, 10 aa, Homo sapiens
TGEESTDRQN

SEQ ID NO: 2549 - protein, 10 aa, Homo sapiens
TKYVASTATG

SEQ ID NO: 2550 - protein, 10 aa, Homo sapiens
TLLKRMHFDY

SEQ ID NO: 2551 - protein, 10 aa, Homo sapiens
TLSDILVNKN

SEQ ID NO: 2552 - protein, 10 aa, Homo sapiens
TNGISLQHED

SEQ ID NO: 2553 - protein, 10 aa, Homo sapiens
TQNCKAQESS

SEQ ID NO: 2554 - protein, 10 aa, Homo sapiens
TTRFRKTSVL

SEQ ID NO: 2555 - protein, 10 aa, Homo sapiens
TWTHLPEDCN

SEQ ID NO: 2556 - skipped

SEQ ID NO: 2557 - protein, 10 aa, Homo sapiens
VILQVRSTAC

SEQ ID NO: 2558 - protein, 10 aa, Homo sapiens
VNFVKILMIQ

SEQ ID NO: 2559 - protein, 10 aa, Homo sapiens
VSRMVGKCET

SEQ ID NO: 2560 - protein, 10 aa, Homo sapiens
VSWRGLYTKP

SEQ ID NO: 2561 - protein, 10 aa, Homo sapiens
VVTKWKKMNF

SEQ ID NO: 2562 - protein, 10 aa, Homo sapiens
VVVVKNGRRY

SEQ ID NO: 2563 - skipped

SEQ ID NO: 2564 - protein, 10 aa, Homo sapiens
WHPNRKQLLK

SEQ ID NO: 2565 - protein, 10 aa, Homo sapiens
WRPFLFSESR

SEQ ID NO: 2566 - protein, 10 aa, Homo sapiens
YFSKRHGMDP

SEQ ID NO: 2567 - protein, 10 aa, Homo sapiens
YLTFPIIYLR

SEQ ID NO: 2568 - protein, 9 aa, Homo sapiens
AIQRQSQMR

SEQ ID NO: 2569 - protein, 9 aa, Homo sapiens
AIWNSSKKN

SEQ ID NO: 2570 - protein, 9 aa, Homo sapiens
AMQKLSGWS

SEQ ID NO: 2571 - protein, 9 aa, Homo sapiens
ASSCQARER

SEQ ID NO: 2572 - protein, 9 aa, Homo sapiens
ATRIQVLSV

SEQ ID NO: 2573 - protein, 9 aa, Homo sapiens
CLSQCQNML

SEQ ID NO: 2574 - protein, 9 aa, Homo sapiens
DIQRKMLVN

SEQ ID NO: 2575 - protein, 9 aa, Homo sapiens
DSASPNGIV

SEQ ID NO: 2576 - protein, 9 aa, Homo sapiens
EELCCVPLE

SEQ ID NO: 2577 - skipped

SEQ ID NO: 2578 - protein, 9 aa, Homo sapiens
EKPGICPGP

SEQ ID NO: 2579 - protein, 9 aa, Homo sapiens
ENANMIFKK

SEQ ID NO: 2580 - protein, 9 aa, Homo sapiens
ENSYIYKML

SEQ ID NO: 2581 - protein, 9 aa, Homo sapiens
ETTQNVAGI

SEQ ID NO: 2582 - protein, 9 aa, Homo sapiens
FSRYPYQMM

SEQ ID NO: 2583 - protein, 9 aa, Homo sapiens
FWTLNKGNF

SEQ ID NO: 2584 - protein, 9 aa, Homo sapiens
GFGKARRGK

SEQ ID NO: 2585 - protein, 9 aa, Homo sapiens
GGILLSMFL

SEQ ID NO: 2586 - protein, 9 aa, Homo sapiens
GNTRNSKSY

SEQ ID NO: 2587 - protein, 9 aa, Homo sapiens
GPSSPSFWV

SEQ ID NO: 2588 - protein, 9 aa, Homo sapiens
GRKCPGVCF

SEQ ID NO: 2589 - protein, 9 aa, Homo sapiens
GRRKTLKQK

SEQ ID NO: 2590 - protein, 9 aa, Homo sapiens
GSFLYFSSE

SEQ ID NO: 2591 - protein, 9 aa, Homo sapiens
GVCAISVQL

SEQ ID NO: 2592 - protein, 9 aa, Homo sapiens
HHLLRIANL

SEQ ID NO: 2593 - protein, 9 aa, Homo sapiens
HLKKVEKLP

SEQ ID NO: 2594 - protein, 9 aa, Homo sapiens
HLYYQLLLF

SEQ ID NO: 2595 - protein, 9 aa, Homo sapiens
HMYQYRQKV

SEQ ID NO: 2596 - protein, 9 aa, Homo sapiens
HQLADRHCH

SEQ ID NO: 2597 - protein, 9 aa, Homo sapiens
HVKKTYADL

SEQ ID NO: 2598 - protein, 9 aa, Homo sapiens
HVQSVTSVP

SEQ ID NO: 2599 - protein, 9 aa, Homo sapiens
IFLKKRKEL

SEQ ID NO: 2600 - protein, 9 aa, Homo sapiens
ILLQSNSYV

SEQ ID NO: 2601 - protein, 9 aa, Homo sapiens
ILRSHFKCP

SEQ ID NO: 2602 - protein, 9 aa, Homo sapiens
ILTRAGSVM

SEQ ID NO: 2603 - protein, 9 aa, Homo sapiens
INEKKSVKS

SEQ ID NO: 2604 - protein, 9 aa, Homo sapiens
KCSIVFCGL

SEQ ID NO: 2605 - protein, 9 aa, Homo sapiens
KEIRSCRNE

SEQ ID NO: 2606 - protein, 9 aa, Homo sapiens
KETEKETAN

SEQ ID NO: 2607 - protein, 9 aa, Homo sapiens
KHKEKVLQS

SEQ ID NO: 2608 - protein, 9 aa, Homo sapiens
KKAHAPART

SEQ ID NO: 2609 - protein, 9 aa, Homo sapiens
KKKLLQFQK

SEQ ID NO: 2610 - protein, 9 aa, Homo sapiens
KKMLTLRYL

SEQ ID NO: 2611 - protein, 9 aa, Homo sapiens
KKSKLSNIH

SEQ ID NO: 2612 - protein, 9 aa, Homo sapiens
KKVQESKDL

SEQ ID NO: 2613 - protein, 9 aa, Homo sapiens
KPPRRDSLI

SEQ ID NO: 2614 - protein, 9 aa, Homo sapiens
KQDINHVLP

SEQ ID NO: 2615 - protein, 9 aa, Homo sapiens
KRRREMERL

SEQ ID NO: 2616 - protein, 9 aa, Homo sapiens
KSREGANHE

SEQ ID NO: 2617 - protein, 9 aa, Homo sapiens
KYKEENSEK

SEQ ID NO: 2618 - protein, 9 aa, Homo sapiens
LALFPATCS

SEQ ID NO: 2619 - protein, 9 aa, Homo sapiens
LAQTGLKSN

SEQ ID NO: 2620 - protein, 9 aa, Homo sapiens
LERYAHANK

SEQ ID NO: 2621 - skipped

SEQ ID NO: 2622 - protein, 9 aa, Homo sapiens
LGTQTGNNY

SEQ ID NO: 2623 - protein, 9 aa, Homo sapiens
LKRTLIRQL

SEQ ID NO: 2624 - protein, 9 aa, Homo sapiens
LLLCNNALS

SEQ ID NO: 2625 - protein, 9 aa, Homo sapiens
LLLMFKYSM

SEQ ID NO: 2626 - protein, 9 aa, Homo sapiens
LNLFYEQPN

SEQ ID NO: 2627 - protein, 9 aa, Homo sapiens
LPKFEGSDL

SEQ ID NO: 2628 - protein, 9 aa, Homo sapiens
LRCSFYTRN

SEQ ID NO: 2629 - protein, 9 aa, Homo sapiens
LRQSIGRKD

SEQ ID NO: 2630 - protein, 9 aa, Homo sapiens
LSIACLGLE

SEQ ID NO: 2631 - protein, 9 aa, Homo sapiens
LSWNKKSKR

SEQ ID NO: 2632 - protein, 9 aa, Homo sapiens
LWMPRMARQ

SEQ ID NO: 2633 - protein, 9 aa, Homo sapiens
LWPMKGERK

SEQ ID NO: 2634 - protein, 9 aa, Homo sapiens
LWQERKWRN

SEQ ID NO: 2635 - protein, 9 aa, Homo sapiens
LYLIDCVNN

SEQ ID NO: 2636 - protein, 9 aa, Homo sapiens
LYPRAIYLG

SEQ ID NO: 2637 - protein, 9 aa, Homo sapiens
MGREVRSAN

SEQ ID NO: 2638 - protein, 9 aa, Homo sapiens
MKLEHQGAA

SEQ ID NO: 2639 - protein, 9 aa, Homo sapiens
NAERAFFRL

SEQ ID NO: 2640 - protein, 9 aa, Homo sapiens
NAVKEDGST

SEQ ID NO: 2641 - protein, 9 aa, Homo sapiens
NCKRQWTRS

SEQ ID NO: 2642 - skipped

SEQ ID NO: 2643 - protein, 9 aa, Homo sapiens
NERKIQRPG

SEQ ID NO: 2644 - protein, 9 aa, Homo sapiens
NFLSKSKIM

SEQ ID NO: 2645 - protein, 9 aa, Homo sapiens
NGAKQDSSH

SEQ ID NO: 2646 - protein, 9 aa, Homo sapiens
NGLTGSFKS

SEQ ID NO: 2647 - protein, 9 aa, Homo sapiens
NKRSFFDND

SEQ ID NO: 2648 - protein, 9 aa, Homo sapiens
NLYYVQLQL

SEQ ID NO: 2649 - protein, 9 aa, Homo sapiens
NNYKNGDPD

SEQ ID NO: 2650 - protein, 9 aa, Homo sapiens
NPTDEWRRS

SEQ ID NO: 2651 - protein, 9 aa, Homo sapiens
NRKPMCYGL

SEQ ID NO: 2652 - protein, 9 aa, Homo sapiens
NRRDRCKGT

SEQ ID NO: 2653 - protein, 9 aa, Homo sapiens
NRRKTQITV

SEQ ID NO: 2654 - protein, 9 aa, Homo sapiens
NRRQVFGKA

SEQ ID NO: 2655 - protein, 9 aa, Homo sapiens
NSLRVLNSS

SEQ ID NO: 2656 - protein, 9 aa, Homo sapiens
NSWLPLGGH

SEQ ID NO: 2657 - protein, 9 aa, Homo sapiens
NSYTQGECP

SEQ ID NO: 2658 - protein, 9 aa, Homo sapiens
NVPCPSLEC

SEQ ID NO: 2659 - protein, 9 aa, Homo sapiens
NVWEKSGYQ

SEQ ID NO: 2660 - protein, 9 aa, Homo sapiens
NWESVFHYK

SEQ ID NO: 2661 - protein, 9 aa, Homo sapiens
NWSKSTKTN

SEQ ID NO: 2662 - protein, 9 aa, Homo sapiens
NYNKNITAD

SEQ ID NO: 2663 - protein, 9 aa, Homo sapiens
NYSASVTGS

SEQ ID NO: 2664 - protein, 9 aa, Homo sapiens
PALREYTMM

SEQ ID NO: 2665 - protein, 9 aa, Homo sapiens
PERKTQKTG

SEQ ID NO: 2666 - protein, 9 aa, Homo sapiens
PKLRYLGEY

SEQ ID NO: 2667 - protein, 9 aa, Homo sapiens
PLPAFPGTS

SEQ ID NO: 2668 - protein, 9 aa, Homo sapiens
PQWRKSIQM

SEQ ID NO: 2669 - protein, 9 aa, Homo sapiens
PRNQLDSRL

SEQ ID NO: 2670 - protein, 9 aa, Homo sapiens
QKGSVQFEE

SEQ ID NO: 2671 - protein, 9 aa, Homo sapiens
QKTVSSGKV

SEQ ID NO: 2672 - protein, 9 aa, Homo sapiens
QRFMAGPCM

SEQ ID NO: 2673 - protein, 9 aa, Homo sapiens
QRKKRKFAH

SEQ ID NO: 2674 - protein, 9 aa, Homo sapiens
QRPVKMFLR

SEQ ID NO: 2675 - protein, 9 aa, Homo sapiens
QSLRTSAKS

SEQ ID NO: 2676 - protein, 9 aa, Homo sapiens
QTISEISEN

SEQ ID NO: 2677 - protein, 9 aa, Homo sapiens
RCKCSARLI

SEQ ID NO: 2678 - protein, 9 aa, Homo sapiens
RCQDWKHRR

SEQ ID NO: 2679 - protein, 9 aa, Homo sapiens
REDFLLEMF

SEQ ID NO: 2680 - protein, 9 aa, Homo sapiens
RFNFKAEDF

SEQ ID NO: 2681 - protein, 9 aa, Homo sapiens
RKERQGKEE

SEQ ID NO: 2682 - protein, 9 aa, Homo sapiens
RKGEEKKKT

SEQ ID NO: 2683 - protein, 9 aa, Homo sapiens
RKSSRYKQL

SEQ ID NO: 2684 - protein, 9 aa, Homo sapiens
RNPRKLCCG

SEQ ID NO: 2685 - protein, 9 aa, Homo sapiens
RNSQKNWRK

SEQ ID NO: 2686 - protein, 9 aa, Homo sapiens
RNVIKILFL

SEQ ID NO: 2687 - protein, 9 aa, Homo sapiens
RPSQNRRRN

SEQ ID NO: 2688 - protein, 9 aa, Homo sapiens
RQEIQEKYE

SEQ ID NO: 2689 - protein, 9 aa, Homo sapiens
RQRFQMEDQ

SEQ ID NO: 2690 - protein, 9 aa, Homo sapiens
RRAPWWDNT

SEQ ID NO: 2691 - skipped

SEQ ID NO: 2692 - protein, 9 aa, Homo sapiens
RRRNMEGRL

SEQ ID NO: 2693 - protein, 9 aa, Homo sapiens
RRSKITKII

SEQ ID NO: 2694 - protein, 9 aa, Homo sapiens
RRVRNCQQK

SEQ ID NO: 2695 - protein, 9 aa, Homo sapiens
RTLEKNFNV

SEQ ID NO: 2696 - protein, 9 aa, Homo sapiens
SCLLSSRCQ

SEQ ID NO: 2697 - protein, 9 aa, Homo sapiens
SGRLNLLMF

SEQ ID NO: 2698 - protein, 9 aa, Homo sapiens
SHWRETLQM

SEQ ID NO: 2699 - protein, 9 aa, Homo sapiens
SIWEDCIYC

SEQ ID NO: 2700 - protein, 9 aa, Homo sapiens
SLSKSMAIM

SEQ ID NO: 2701 - protein, 9 aa, Homo sapiens
SNYSKRTGA

SEQ ID NO: 2702 - protein, 9 aa, Homo sapiens
SPEAWKRNS

SEQ ID NO: 2703 - protein, 9 aa, Homo sapiens
SPQSCPKGE

SEQ ID NO: 2704 - protein, 9 aa, Homo sapiens
SSESTCPCR

SEQ ID NO: 2705 - skipped

SEQ ID NO: 2706 - protein, 9 aa, Homo sapiens
STIMAPLKF

SEQ ID NO: 2707 - protein, 9 aa, Homo sapiens
STRQKQTAI

SEQ ID NO: 2708 - protein, 9 aa, Homo sapiens
TAFTKLAPA

SEQ ID NO: 2709 - protein, 9 aa, Homo sapiens
TAFTKLAPT

SEQ ID NO: 2710 - protein, 9 aa, Homo sapiens
TEGKYFCTK

SEQ ID NO: 2711 - protein, 9 aa, Homo sapiens
THRGGEGSG

SEQ ID NO: 2712 - protein, 9 aa, Homo sapiens
TPLDIFYKE

SEQ ID NO: 2713 - protein, 9 aa, Homo sapiens
TRKEKRRDA

SEQ ID NO: 2714 - protein, 9 aa, Homo sapiens
TRPQKIPHP

SEQ ID NO: 2715 - protein, 9 aa, Homo sapiens
TSRSSAMNA

SEQ ID NO: 2716 - protein, 9 aa, Homo sapiens
VALMSSTII

SEQ ID NO: 2717 - protein, 9 aa, Homo sapiens
VDRYFQSEL

SEQ ID NO: 2718 - protein, 9 aa, Homo sapiens
VHMDCGYLS

SEQ ID NO: 2719 - protein, 9 aa, Homo sapiens
VMLLFSHPK

SEQ ID NO: 2720 - protein, 9 aa, Homo sapiens
VTRETTLIL

SEQ ID NO: 2721 - protein, 9 aa, Homo sapiens
WWCCYYSLL

SEQ ID NO: 2722 - protein, 9 aa, Homo sapiens
YFQKMIFLK

SEQ ID NO: 2723 - protein, 9 aa, Homo sapiens
YQKYLFQLK

SEQ ID NO: 2724 - protein, 9 aa, Homo sapiens
YRKFQKASL

SEQ ID NO: 2725 - protein, 9 aa, Homo sapiens
YYRSTIIVV

SEQ ID NO: 2726 - skipped

SEQ ID NO: 2727 - protein, 8 aa, Homo sapiens
AHPFKTTL

SEQ ID NO: 2728 - protein, 8 aa, Homo sapiens
AMKKATKS

SEQ ID NO: 2729 - protein, 8 aa, Homo sapiens
AMLVHHLR

SEQ ID NO: 2730 - protein, 8 aa, Homo sapiens
AQRERSWT

SEQ ID NO: 2731 - protein, 8 aa, Homo sapiens
AREVRTSH

SEQ ID NO: 2732 - protein, 8 aa, Homo sapiens
ASAGTLIR

SEQ ID NO: 2733 - protein, 8 aa, Homo sapiens
CIMWTLTM

SEQ ID NO: 2734 - protein, 8 aa, Homo sapiens
CKIRVFSK

SEQ ID NO: 2735 - protein, 8 aa, Homo sapiens
CLKKLQSY

SEQ ID NO: 2736 - protein, 8 aa, Homo sapiens
CLKLFLSS

SEQ ID NO: 2737 - protein, 8 aa, Homo sapiens
CQKICHMK

SEQ ID NO: 2738 - protein, 8 aa, Homo sapiens
CSLSHQEK

SEQ ID NO: 2739 - protein, 8 aa, Homo sapiens
DSVRGKES

SEQ ID NO: 2740 - protein, 8 aa, Homo sapiens
DSVRGKGV

SEQ ID NO: 2741 - protein, 8 aa, Homo sapiens
DVLQLFLH

SEQ ID NO: 2742 - protein, 8 aa, Homo sapiens
EHNRRPIQ

SEQ ID NO: 2743 - protein, 8 aa, Homo sapiens
EHTGSTEK

SEQ ID NO: 2744 - protein, 8 aa, Homo sapiens
EIFKERCL

SEQ ID NO: 2745 - protein, 8 aa, Homo sapiens
EKKYLITS

SEQ ID NO: 2746 - protein, 8 aa, Homo sapiens
EKRRKLQN

SEQ ID NO: 2747 - protein, 8 aa, Homo sapiens
ERKIKETV

SEQ ID NO: 2748 - protein, 8 aa, Homo sapiens
ESRRHSGQ

SEQ ID NO: 2749 - protein, 8 aa, Homo sapiens
ESSDDSWN

SEQ ID NO: 2750 - protein, 8 aa, Homo sapiens
ETTLRGTV

SEQ ID NO: 2751 - protein, 8 aa, Homo sapiens
FFNPEKCG

SEQ ID NO: 2752 - protein, 8 aa, Homo sapiens
FQNLLSYH

SEQ ID NO: 2753 - skipped

SEQ ID NO: 2754 - protein, 8 aa, Homo sapiens
FTRNTSFS

SEQ ID NO: 2755 - protein, 8 aa, Homo sapiens
GDGRNSTR

SEQ ID NO: 2756 - protein, 8 aa, Homo sapiens
GGGENGSG

SEQ ID NO: 2757 - protein, 8 aa, Homo sapiens
GISGESTS

SEQ ID NO: 2758 - protein, 8 aa, Homo sapiens
GIWGESTS

SEQ ID NO: 2759 - protein, 8 aa, Homo sapiens
GRRSFLVL

SEQ ID NO: 2760 - protein, 8 aa, Homo sapiens
HCWFQHHD

SEQ ID NO: 2761 - protein, 8 aa, Homo sapiens
HESRLQQR

SEQ ID NO: 2762 - protein, 8 aa, Homo sapiens
HQPSGSTQ

SEQ ID NO: 2763 - protein, 8 aa, Homo sapiens
IFIFDCCF

SEQ ID NO: 2764 - protein, 8 aa, Homo sapiens
IFNFASRE

SEQ ID NO: 2765 - protein, 8 aa, Homo sapiens
IFSKYSKC

SEQ ID NO: 2766 - protein, 8 aa, Homo sapiens
IKDCKHLF

SEQ ID NO: 2767 - protein, 8 aa, Homo sapiens
ILQKENSP

SEQ ID NO: 2768 - protein, 8 aa, Homo sapiens
ILRLNDKP

SEQ ID NO: 2769 - protein, 8 aa, Homo sapiens
IMKMHKYL

SEQ ID NO: 2770 - skipped

SEQ ID NO: 2771 - protein, 8 aa, Homo sapiens
INSRCGSQ

SEQ ID NO: 2772 - protein, 8 aa, Homo sapiens
IQSELPPY

SEQ ID NO: 2773 - protein, 8 aa, Homo sapiens
IRVVIESN

SEQ ID NO: 2774 - protein, 8 aa, Homo sapiens
ISRNGKRT

SEQ ID NO: 2775 - protein, 8 aa, Homo sapiens
IWSIVRQL

SEQ ID NO: 2776 - protein, 8 aa, Homo sapiens
KAEYYYCG

SEQ ID NO: 2777 - protein, 8 aa, Homo sapiens
KARKLMRK

SEQ ID NO: 2778 - protein, 8 aa, Homo sapiens
KATKLETC

SEQ ID NO: 2779 - protein, 8 aa, Homo sapiens
KCCEAQAL

SEQ ID NO: 2780 - protein, 8 aa, Homo sapiens
KCFARSLF

SEQ ID NO: 2781 - protein, 8 aa, Homo sapiens
KGCKQKEL

SEQ ID NO: 2782 - protein, 8 aa, Homo sapiens
KGTPQLSA

SEQ ID NO: 2783 - protein, 8 aa, Homo sapiens
KHQIRESE

SEQ ID NO: 2784 - protein, 8 aa, Homo sapiens
KHQSYELC

SEQ ID NO: 2785 - protein, 8 aa, Homo sapiens
KIHGWTMY

SEQ ID NO: 2786 - protein, 8 aa, Homo sapiens
KIRFFPDL

SEQ ID NO: 2787 - protein, 8 aa, Homo sapiens
KIRKFIPT

SEQ ID NO: 2788 - protein, 8 aa, Homo sapiens
KKKLWKLI

SEQ ID NO: 2789 - protein, 8 aa, Homo sapiens
KKLEVSVP

SEQ ID NO: 2790 - protein, 8 aa, Homo sapiens
KKRTRIIM

SEQ ID NO: 2791 - protein, 8 aa, Homo sapiens
KNQERFSI

SEQ ID NO: 2792 - protein, 8 aa, Homo sapiens
KNSKYKRF

SEQ ID NO: 2793 - protein, 8 aa, Homo sapiens
KNWFLQGL

SEQ ID NO: 2794 - protein, 8 aa, Homo sapiens
KQASTSHC

SEQ ID NO: 2795 - protein, 8 aa, Homo sapiens
KQSQGTSS

SEQ ID NO: 2796 - protein, 8 aa, Homo sapiens
KRRPQTRP

SEQ ID NO: 2797 - protein, 8 aa, Homo sapiens
KSNDLEYT

SEQ ID NO: 2798 - protein, 8 aa, Homo sapiens
KSQAIQRK

SEQ ID NO: 2799 - protein, 8 aa, Homo sapiens
KTKKQQSV

SEQ ID NO: 2800 - protein, 8 aa, Homo sapiens
KTKTSISC

SEQ ID NO: 2801 - protein, 8 aa, Homo sapiens
KWLPNGKR

SEQ ID NO: 2802 - protein, 8 aa, Homo sapiens
LFRMEAII

SEQ ID NO: 2803 - protein, 8 aa, Homo sapiens
LGKEISNM

SEQ ID NO: 2804 - protein, 8 aa, Homo sapiens
LKRLYIKV

SEQ ID NO: 2805 - protein, 8 aa, Homo sapiens
LNFLWVVS

SEQ ID NO: 2806 - protein, 8 aa, Homo sapiens
LPFKEQNH

SEQ ID NO: 2807 - protein, 8 aa, Homo sapiens
LPNARKID

SEQ ID NO: 2808 - protein, 8 aa, Homo sapiens
LPRETMDN

SEQ ID NO: 2809 - protein, 8 aa, Homo sapiens
LQLLCKCQ

SEQ ID NO: 2810 - protein, 8 aa, Homo sapiens
LQNSLFSP

SEQ ID NO: 2811 - protein, 8 aa, Homo sapiens
LSLRFETR

SEQ ID NO: 2812 - protein, 8 aa, Homo sapiens
LWIQRFQY

SEQ ID NO: 2813 - protein, 8 aa, Homo sapiens
LYRIKKLV

SEQ ID NO: 2814 - protein, 8 aa, Homo sapiens
MHQKSSDF

SEQ ID NO: 2815 - protein, 8 aa, Homo sapiens
MVYTHVNY

SEQ ID NO: 2816 - protein, 8 aa, Homo sapiens
MWKNLTGT

SEQ ID NO: 2817 - protein, 8 aa, Homo sapiens
NADSSALC

SEQ ID NO: 2818 - protein, 8 aa, Homo sapiens
NAERTRNI

SEQ ID NO: 2819 - protein, 8 aa, Homo sapiens
NALCFLCI

SEQ ID NO: 2820 - protein, 8 aa, Homo sapiens
NCCYATMH

SEQ ID NO: 2821 - protein, 8 aa, Homo sapiens
NCISFKKV

SEQ ID NO: 2822 - protein, 8 aa, Homo sapiens
NCPGISWK

SEQ ID NO: 2823 - protein, 8 aa, Homo sapiens
NDGKASQN

SEQ ID NO: 2824 - protein, 8 aa, Homo sapiens
NEEKQGRL

SEQ ID NO: 2825 - protein, 8 aa, Homo sapiens
NEQTTKHQ

SEQ ID NO: 2826 - protein, 8 aa, Homo sapiens
NFGDEERL

SEQ ID NO: 2827 - protein, 8 aa, Homo sapiens
NFSWSKIM

SEQ ID NO: 2828 - protein, 8 aa, Homo sapiens
NGGIGKKR

SEQ ID NO: 2829 - protein, 8 aa, Homo sapiens
NHGVVQRL

SEQ ID NO: 2830 - protein, 8 aa, Homo sapiens
NIIIEQAI

SEQ ID NO: 2831 - protein, 8 aa, Homo sapiens
NIKCLQRN

SEQ ID NO: 2832 - protein, 8 aa, Homo sapiens
NKAAKWIL

SEQ ID NO: 2833 - protein, 8 aa, Homo sapiens
NLQTLRKK

SEQ ID NO: 2834 - protein, 8 aa, Homo sapiens
NNSWKGKA

SEQ ID NO: 2835 - protein, 8 aa, Homo sapiens
NPGKIQKA

SEQ ID NO: 2836 - protein, 8 aa, Homo sapiens
NPHWRKTL

SEQ ID NO: 2837 - skipped

SEQ ID NO: 2838 - protein, 8 aa, Homo sapiens
NPSIASHE

SEQ ID NO: 2839 - protein, 8 aa, Homo sapiens
NPYWGKAL

SEQ ID NO: 2840 - protein, 8 aa, Homo sapiens
NRGCNCHF

SEQ ID NO: 2841 - protein, 8 aa, Homo sapiens
NSERSCNL

SEQ ID NO: 2842 - protein, 8 aa, Homo sapiens
NSGSGATS

SEQ ID NO: 2843 - protein, 8 aa, Homo sapiens
NSHWREPI

SEQ ID NO: 2844 - protein, 8 aa, Homo sapiens
NSKKKEYT

SEQ ID NO: 2845 - protein, 8 aa, Homo sapiens
NSKWRLEA

SEQ ID NO: 2846 - protein, 8 aa, Homo sapiens
NSKYVAIL

SEQ ID NO: 2847 - protein, 8 aa, Homo sapiens
NSPRPSNL

SEQ ID NO: 2848 - protein, 8 aa, Homo sapiens
NSSCESNI

SEQ ID NO: 2849 - protein, 8 aa, Homo sapiens
NSSRRSTR

SEQ ID NO: 2850 - protein, 8 aa, Homo sapiens
NSYWRETL

SEQ ID NO: 2851 - protein, 8 aa, Homo sapiens
NSYWRKAL

SEQ ID NO: 2852 - protein, 8 aa, Homo sapiens
NTSQWPDE

SEQ ID NO: 2853 - protein, 8 aa, Homo sapiens
NTYTGCYI

SEQ ID NO: 2854 - protein, 8 aa, Homo sapiens
NVLRLTSC

SEQ ID NO: 2855 - protein, 8 aa, Homo sapiens
NVWRPERV

SEQ ID NO: 2856 - protein, 8 aa, Homo sapiens
NWKRHGHN

SEQ ID NO: 2857 - protein, 8 aa, Homo sapiens
NYPFAINM

SEQ ID NO: 2858 - protein, 8 aa, Homo sapiens
PFQPAPHM

SEQ ID NO: 2859 - protein, 8 aa, Homo sapiens
PLRKVRRL

SEQ ID NO: 2860 - protein, 8 aa, Homo sapiens
PWESGQAV

SEQ ID NO: 2861 - protein, 8 aa, Homo sapiens
QEVSKSKF

SEQ ID NO: 2862 - protein, 8 aa, Homo sapiens
QFRLLVLL

SEQ ID NO: 2863 - protein, 8 aa, Homo sapiens
QGGGGEVY

SEQ ID NO: 2864 - protein, 8 aa, Homo sapiens
QIICAQTL

SEQ ID NO: 2865 - protein, 8 aa, Homo sapiens
QIMYMKLY

SEQ ID NO: 2866 - protein, 8 aa, Homo sapiens
QIPACCLH

SEQ ID NO: 2867 - protein, 8 aa, Homo sapiens
QIPRYSSI

SEQ ID NO: 2868 - protein, 8 aa, Homo sapiens
QIRKNSLL

SEQ ID NO: 2869 - protein, 8 aa, Homo sapiens
QISQHPSQ

SEQ ID NO: 2870 - protein, 8 aa, Homo sapiens
QKKRLLGA

SEQ ID NO: 2871 - protein, 8 aa, Homo sapiens
QNCLTSWK

SEQ ID NO: 2872 - protein, 8 aa, Homo sapiens
RFQWPLRP

SEQ ID NO: 2873 - protein, 8 aa, Homo sapiens
RGATEYCL

SEQ ID NO: 2874 - protein, 8 aa, Homo sapiens
RHSERSCQ

SEQ ID NO: 2875 - protein, 8 aa, Homo sapiens
RKASCLQC

SEQ ID NO: 2876 - protein, 8 aa, Homo sapiens
RKREKKRW

SEQ ID NO: 2877 - protein, 8 aa, Homo sapiens
RMGGTIQE

SEQ ID NO: 2878 - protein, 8 aa, Homo sapiens
RMLRSYGS

SEQ ID NO: 2879 - skipped

SEQ ID NO: 2880 - protein, 8 aa, Homo sapiens
RQKKPLYL

SEQ ID NO: 2881 - protein, 8 aa, Homo sapiens
RQPQKKNS

SEQ ID NO: 2882 - protein, 8 aa, Homo sapiens
RQSYERKI

SEQ ID NO: 2883 - protein, 8 aa, Homo sapiens
RQYRGKAR

SEQ ID NO: 2884 - protein, 8 aa, Homo sapiens
RRFPYWEG

SEQ ID NO: 2885 - protein, 8 aa, Homo sapiens
RSVHPFHL

SEQ ID NO: 2886 - protein, 8 aa, Homo sapiens
RTMKQLIA

SEQ ID NO: 2887 - protein, 8 aa, Homo sapiens
RTWLPTSS

SEQ ID NO: 2888 - protein, 8 aa, Homo sapiens
RVNSDLEN

SEQ ID NO: 2889 - protein, 8 aa, Homo sapiens
RWTHADNS

SEQ ID NO: 2890 - protein, 8 aa, Homo sapiens
RYLRMMTS

SEQ ID NO: 2891 - protein, 8 aa, Homo sapiens
SFIHEEDC

SEQ ID NO: 2892 - protein, 8 aa, Homo sapiens
SGPALNSP

SEQ ID NO: 2893 - protein, 8 aa, Homo sapiens
SICKHLAL

SEQ ID NO: 2894 - protein, 8 aa, Homo sapiens
SIRNKGRN

SEQ ID NO: 2895 - protein, 8 aa, Homo sapiens
SKHMEKKV

SEQ ID NO: 2896 - protein, 8 aa, Homo sapiens
SMETKLII

SEQ ID NO: 2897 - protein, 8 aa, Homo sapiens
SPVEERAR

SEQ ID NO: 2898 - protein, 8 aa, Homo sapiens
SSSFLGHH

SEQ ID NO: 2899 - protein, 8 aa, Homo sapiens
SSTKKALS

SEQ ID NO: 2900 - protein, 8 aa, Homo sapiens
SSWSWILL

SEQ ID NO: 2901 - protein, 8 aa, Homo sapiens
STKIHIGY

SEQ ID NO: 2902 - skipped

SEQ ID NO: 2903 - protein, 8 aa, Homo sapiens
SVPEAATR

SEQ ID NO: 2904 - protein, 8 aa, Homo sapiens
SWLPELVG

SEQ ID NO: 2905 - protein, 8 aa, Homo sapiens
TAEGSLWT

SEQ ID NO: 2906 - protein, 8 aa, Homo sapiens
TAVTLMVM

SEQ ID NO: 2907 - protein, 8 aa, Homo sapiens
TLLHGKNV

SEQ ID NO: 2908 - protein, 8 aa, Homo sapiens
TPYQSLWP

SEQ ID NO: 2909 - protein, 8 aa, Homo sapiens
TQGRRWDI

SEQ ID NO: 2910 - protein, 8 aa, Homo sapiens
TRRTLTRW

SEQ ID NO: 2911 - protein, 8 aa, Homo sapiens
TTVILHGL

SEQ ID NO: 2912 - protein, 8 aa, Homo sapiens
TVPWKWGL

SEQ ID NO: 2913 - protein, 8 aa, Homo sapiens
TVYIILRM

SEQ ID NO: 2914 - protein, 8 aa, Homo sapiens
TWKQATLN

SEQ ID NO: 2915 - protein, 8 aa, Homo sapiens
TWYYQRRK

SEQ ID NO: 2916 - protein, 8 aa, Homo sapiens
TYENAQSI

SEQ ID NO: 2917 - protein, 8 aa, Homo sapiens
TYRPEWNL

SEQ ID NO: 2918 - protein, 8 aa, Homo sapiens
VFMNKTLM

SEQ ID NO: 2919 - protein, 8 aa, Homo sapiens
VKEFRRFS

SEQ ID NO: 2920 - protein, 8 aa, Homo sapiens
VKRNRIVK

SEQ ID NO: 2921 - protein, 8 aa, Homo sapiens
VLPLFLIV

SEQ ID NO: 2922 - protein, 8 aa, Homo sapiens
VMSMEMIL

SEQ ID NO: 2923 - protein, 8 aa, Homo sapiens
VNNFFKKL

SEQ ID NO: 2924 - protein, 8 aa, Homo sapiens
VRLLEESI

SEQ ID NO: 2925 - protein, 8 aa, Homo sapiens
VSNCNTKH

SEQ ID NO: 2926 - protein, 8 aa, Homo sapiens
VTELAVAQ

SEQ ID NO: 2927 - protein, 8 aa, Homo sapiens
VTKLLQSK

SEQ ID NO: 2928 - protein, 8 aa, Homo sapiens
WLLRETLP

SEQ ID NO: 2929 - protein, 8 aa, Homo sapiens
WRLCIHLL

SEQ ID NO: 2930 - protein, 8 aa, Homo sapiens
YGDSKLVR

SEQ ID NO: 2931 - protein, 8 aa, Homo sapiens
YLLGKFCS

SEQ ID NO: 2932 - protein, 8 aa, Homo sapiens
YLSALYSD

SEQ ID NO: 2933 - protein, 8 aa, Homo sapiens
YSSLWWKS

SEQ ID NO: 2934 - protein, 8 aa, Homo sapiens
YYQNLHNL

SEQ ID NO: 2935 - protein, 97 aa, Homo sapiens
FFLCLKKEVWNVTRNRLKIQYQMHLRSFLLLLLLHRVLQGKAILWLPVVLWIIFQILVTVKFLHDPVLLAIRLLTQCQSHCTMRGARGILSASWKQT

SEQ ID NO: 2936 - protein, 89 aa, Homo sapiens
DSIVKPRDFLIRRMISQDLGSTMLFTSHRCPTVSHCPRKELACFPQCAPDWTPSFLNTLQRMHTLSHRILFPRETLVIRVPACSSCQAL

SEQ ID NO: 2937 - protein, 89 aa, Homo sapiens
LILIQHGGIFTFRFWVEKLSWNICKNLSLYLDKFVQRLLYVYIIETNVFVLNLFHVPVNQIFMMAFYLKYTEKAWVMELEWLIQQQCYQ

SEQ ID NO: 2938 - protein, 86 aa, Homo sapiens
RKSPITRNLRQWPCLRASRVHTLKDHRWAVRLGLWKAVQLLKGSRNPTVQRRSLRKGSLRLSKGHECLVMIFQCPVRTLRAHSLIQ

SEQ ID NO: 2939 - protein, 84 aa, Homo sapiens
EKIKPKKTVKSHHIKNPDYLLQKRPPRKKIKDIHLQRNLKILYLETLMRKKVLQNLNFGRVHYQRQMKNHRKKNLMSIFRICFY

SEQ ID NO: 2940 - skipped

SEQ ID NO: 2941 - protein, 82 aa, Homo sapiens
RKDRRAKNRVLMIMIAKNWKIKIQNQKRLQNRKWKCTLGVMMMMILTNFLKKLKGKLKNQIRSGMGQRRMRITVKKLKSVQE

SEQ ID NO: 2942 - protein, 81 aa, Homo sapiens
RRRKRRDIQENQRTLLKIQNCTYPGSPAWRLSPSSGEPRVAFLSLVARLWKASDLSVRKRNTYGWKAGMTGVVSLSMARVI

SEQ ID NO: 2943 - protein, 79 aa, Homo sapiens
IPRLLVSRPPSLHPSQQAETRPERLLAPLIQKKQLALKHQLRHPLHPPHLVPKLQRRQFLAKQGQWGPPRAREKLTSSQ

SEQ ID NO: 2944 - skipped

SEQ ID NO: 2945 - protein, 74 aa, Homo sapiens
TKDLIAHSLVTVMAEKNFVKRRRNILMIAQKKGFTSSLPCLKIVIAVTTSSLGKSDGHERRKVVVILQLRNKNH

SEQ ID NO: 2946 - protein, 73 aa, Homo sapiens
IRTMVEAAFGRRHCWCCLSNKHCPFGPSENHDAGSRFKIRQNEHIWWLSTDGKRRRYPLALEGKWYKRHQNCS

SEQ ID NO: 2947 - protein, 72 aa, Homo sapiens
RKRKGGRKRRKKLQHLKGMMQMRSTQNMLSRTSEKARRRKGDIKKERSQMKERVQLKGMRRRTLQEQVGLGN

SEQ ID NO: 2948 - protein, 72 aa, Homo sapiens
SLPQKVLRRKLTEHIQRPSVVLEVLLTHFWTFLMIQMLLCTKVDSWLGKFMQIWMERRLQEENEDGKPFMLY

SEQ ID NO: 2949 - skipped

SEQ ID NO: 2950 - protein, 68 aa, Homo sapiens
ILLYWSFWNDCRMGLLVSMELQKNPLGYLERASFVVMKMKLTLPLYIALCVQLICALSVLKLLILQRH

SEQ ID NO: 2951 - protein, 66 aa, Homo sapiens
MLQKQCCYNLVIKHPLIFRINLRRQGKTKDGVVQSLGFLNQQIILQKEFFICLLMFIKRWKPAATK

SEQ ID NO: 2952 - protein, 66 aa, Homo sapiens
SMEIAKFPFPLKIIEKCILMKTAIALKMRLTGRILVMIPTDQQNRFPLLKRALLEKEKISPPNMMK

SEQ ID NO: 2953 - protein, 65 aa, Homo sapiens
KELASKFLQQSVQYKKGAQVSFLILGYRGDCYTRLFSPLIPQTTAWFYRDCFTLHQVLHLVLRGH

SEQ ID NO: 2954 - skipped

SEQ ID NO: 2955 - protein, 64 aa, Homo sapiens
IRLLRNRLKRQNVKHLCLRLWTLPLKTSVTKLKLKRKGGACRTTASCTASSVSCCQMFPRGTHP

SEQ ID NO: 2956 - protein, 64 aa, Homo sapiens
RSLLYSRMCLVQIPTHTWEPDYFVSLPMMFSWATQSFPVGAVFLTRPAIPCCSCTSHSNPWSQS

SEQ ID NO: 2957 - protein, 64 aa, Homo sapiens
TRKHKHFYWKHLKFIGNWILKQFLHKLYLEISHQLIMAYPKIKETICGHLPKILYLHHCQRHIQ

SEQ ID NO: 2958 - protein, 62 aa, Homo sapiens
SLLFKLVGILLSDANQMLFPGQLSLGKEERRPLDKAKEYFSWRMAASRYIILPGQMLDHIHA

SEQ ID NO: 2959 - protein, 62 aa, Homo sapiens
TYMEMHYGHQAPQVAMLPKLLCRQMLPTLSTLQQRHPQGPCPPPVTPLRVQSVLLLGVPQTA

SEQ ID NO: 2960 - protein, 60 aa, Homo sapiens
QFEERERGKNESARNPGISPGAFPVGLAQSGESICLYKIRRRVNVPAKTQTRVARRGSLS

SEQ ID NO: 2961 - protein, 60 aa, Homo sapiens
SSKDKNLALLREHLVGGRLFYMWISLEKQASNAFFSQEEQRCYLVILYLYLKRPHIFFLT

SEQ ID NO: 2962 - protein, 59 aa, Homo sapiens
SEKDIMQLMLISILGRSGALLQHFRISSFLRPSLIYIFLLITQHNLFILCHVLIILSKI

SEQ ID NO: 2963 - protein, 58 aa, Homo sapiens
CYLHHWNYLSFLKGQIIREMSFHLLNYRTSNISHQWIRLHFQKALEIKHISKGVHRVG

SEQ ID NO: 2964 - protein, 58 aa, Homo sapiens
FMRNFLNMLCFENILLHLHQIMKFLLRQPGQGIWKLRLIQPSLWLSLWIRPNLLLFHI

SEQ ID NO: 2965 - protein, 58 aa, Homo sapiens
QRLQSPHTPLVFSFIWPLSTLQINVCLSKKFIAGFWTIFHILLLHQQAGRILFDIICP

SEQ ID NO: 2966 - protein, 57 aa, Homo sapiens
KSAAERTRGSRACGDRAHSGDTGASGSAVPVHHQEEEEAQRERNLRARRQDSEAGTD

SEQ ID NO: 2967 - protein, 57 aa, Homo sapiens
RSINTEVNIRNINIPQKKTRIKNINISINIRNTKEKRLLMLLIKRVCLQQKELNLMI

SEQ ID NO: 2968 - protein, 56 aa, Homo sapiens
DLRKNKEQPAKTGPSQKRTGRRGGSIKVLIPTMEHRTGFTLAATGTEITSICLTFI

SEQ ID NO: 2969 - protein, 56 aa, Homo sapiens
RKSCLCGRHLWHCTMFCGCCSSDIQKTALLGWNSSTSSWTCTNLSPPESRSCFRSC

SEQ ID NO: 2970 - skipped

SEQ ID NO: 2971 - protein, 55 aa, Homo sapiens
SKQQGVPQVSLVEIEFISVKEAAVLVEHAELILQQNCMEKIVNSFLIKYKQKKHP

SEQ ID NO: 2972 - protein, 54 aa, Homo sapiens
QFEERERGKNESARNPVPVGLAQSGESICLYKIRRRVNVPAKTQTRVARRGSLS

SEQ ID NO: 2973 - protein, 54 aa, Homo sapiens
RRNNTRFQQMTNYCMILKKITEIRPGLMHREGVTMVWDHRDHVNNSLFQIVMLS

SEQ ID NO: 2974 - protein, 54 aa, Homo sapiens
TNSTRFLTSETYLLNRENQKKQLQVALNRSHLEQMKTNTKEEMTRHLTLLVKRS

SEQ ID NO: 2975 - protein, 53 aa, Homo sapiens
KQHPRASCHRNSLVKCNEHCGMEQKRGACSRASHQALEAIQPSTCCLYYSRSV

SEQ ID NO: 2976 - protein, 53 aa, Homo sapiens
TALKYIFVAVRAICVMKSFLIFRRWKSHSPLQIQLHLSHPITTSCSIPWCHLC

SEQ ID NO: 2977 - skipped

SEQ ID NO: 2978 - protein, 52 aa, Homo sapiens
TRTSLHQATRKHIIIPLERRSPQAHKLWMIVIIKDIFLMKRFLTLASAHVGV

SEQ ID NO: 2979 - protein, 51 aa, Homo sapiens
STKDVQPASSQPASEQHPLTVHIPYCFSTTRLPNTAQVLAAAVLPSAVYAV

SEQ ID NO: 2980 - protein, 51 aa, Homo sapiens
STRPSGSFLSSWRCFSFSGHPTMWLSFSLPINPSYLEMTVSGASIWTWSCW

SEQ ID NO: 2981 - protein, 50 aa, Homo sapiens
ILFHYPHFWKDFLATSSPTRRRRQRRTVTCQIMVMMWMGGKTPWLNHVSC

SEQ ID NO: 2982 - protein, 49 aa, Homo sapiens
PQQRAPLVELKILARGSHSSRPGSHPRRHIQSQLSQALELGQPSTDFIL

SEQ ID NO: 2983 - protein, 48 aa, Homo sapiens
ICPWKRQPGAVAQRIGSHLVPTATLFLLNQHLGKTVRRTVLEWRLTCW

SEQ ID NO: 2984 - protein, 48 aa, Homo sapiens
RTWLFNSRKWNCTKPWADFSFKFMPQVYVPTTFQHNPSKHCKCLGKRA

SEQ ID NO: 2985 - protein, 47 aa, Homo sapiens
TRRKKRSKRRGKSSRRMKEGRRRRRMPRRRRRGKIPNLSSRRFPSQT

SEQ ID NO: 2986 - protein, 46 aa, Homo sapiens
MKREKLKEMKKSVQCCVFNFMDTILLLIVYLKQMLRNLSPEAIGIH

SEQ ID NO: 2987 - protein, 46 aa, Homo sapiens
QLALKHQLRHPLHPPHLVPKLQRRQFLAKQGQWGPPRAREKLTSSQ

SEQ ID NO: 2988 - protein, 46 aa, Homo sapiens
STTKCQSGTAETYNSWKVKNLQLEPRRVTSQMNRQVKDMTAILSQS

SEQ ID NO: 2989 - skipped

SEQ ID NO: 2990 - protein, 46 aa, Homo sapiens
TTLAFQKSLPWPKLLPKTRSMTHLTEKPRKKSLLGPLTQIHQILLS

SEQ ID NO: 2991 - skipped

SEQ ID NO: 2992 - protein, 44 aa, Homo sapiens
KTKNLPLKTKLKKKENKTTLNLQMAEHHLLCPRIMNKAQPYGIC

SEQ ID NO: 2993 - protein, 44 aa, Homo sapiens
KVRGPGHLHDRGAEEILQCHEEVGLQEAPEAHPTAPEQVPGFCL

SEQ ID NO: 2994 - protein, 44 aa, Homo sapiens
MDLDGMLTVIGQGLVGMTPRDLGTVAGATAQIQRPIQVQTGGRL

SEQ ID NO: 2995 - skipped

SEQ ID NO: 2996 - protein, 44 aa, Homo sapiens
RKSPVTGNMRHWPCLKDRKQAERPGLICRNPSLLWAWMMKLHNY

SEQ ID NO: 2997 - protein, 44 aa, Homo sapiens
RRRHQPPTPTPRPIRTGPSLSRWPWRGRRPPPPLPPPPPTPMCL

SEQ ID NO: 2998 - protein, 44 aa, Homo sapiens
TLNWKREPRLSYLKTMYSSLFWSQFPFLQCCHHHHLHHHYHHVL

SEQ ID NO: 2999 - protein, 43 aa, Homo sapiens
KDNKAAIGKGQVQETGSERAREEQDARPQRRSGQLKKSGPLLF

SEQ ID NO: 3000 - protein, 43 aa, Homo sapiens
KQGCLSQLQQHHRQHSGKLQLTQHCFSKPRLCKDGEQRRLFRA

SEQ ID NO: 3001 - protein, 43 aa, Homo sapiens
PSLALMCFLRRRSGLHPWTCFVQLTETSLQERLPHIVVVTLRQ

SEQ ID NO: 3002 - protein, 43 aa, Homo sapiens
PTCMIIREFILEKNPILVRNVGKTSAEVQLLLNTREFILEINS

SEQ ID NO: 3003 - protein, 43 aa, Homo sapiens
QNWKKTSKMINQPRKSMCQKRGTLKRNETRLKRKARNLLGRKK

SEQ ID NO: 3004 - protein, 43 aa, Homo sapiens
REPLVLPPSKRSLLSVGNLIGLPIMPSRCENSSLGGMLEMSMH

SEQ ID NO: 3005 - protein, 43 aa, Homo sapiens
RRVHFQTARGLFSSSHNREQASQPKDSRTKKEPSRTEKGYAVF

SEQ ID NO: 3006 - protein, 42 aa, Homo sapiens
KFDAEVKVNRRYLRKGRICFYSAKAANLFQKLREFQFFTNEK

SEQ ID NO: 3007 - protein, 42 aa, Homo sapiens
RNLILMIKVHKFEHHLLPSPLHNLSKYTDKLQKARMLLPPKA

SEQ ID NO: 3008 - protein, 41 aa, Homo sapiens
MKLTLAVLPTLRNLHCYPQLCLQGRLAARNANMNLEILLGV

SEQ ID NO: 3009-3010 - skipped (2 entries)

SEQ ID NO: 3011 - protein, 40 aa, Homo sapiens
RARNRNMKKTMSHLIAHQALKMSGLRLFHPRLLTRKKPGK

SEQ ID NO: 3012 - protein, 40 aa, Homo sapiens
SLRKILDVLSSPPVTGKNKENLKNISETNISQPKLTSGRF

SEQ ID NO: 3013 - protein, 39 aa, Homo sapiens
IMKLSNRDKMRKGWYRALLQYLVKTTNGSEKVKKRLENF

SEQ ID NO: 3014 - protein, 39 aa, Homo sapiens
PYPISEGLTMTTGRNINSNSLMTNCLFSPIFLCHHAIMH

SEQ ID NO: 3015 - skipped

SEQ ID NO: 3016 - protein, 39 aa, Homo sapiens
SPISGGHCNLWRCIFSSASIFLQGQHGYLFQSILHARRV

SEQ ID NO: 3017 - protein, 39 aa, Homo sapiens
TCSKATFGTSLSPFATPTRSGTCCWAWTAPTAWTVAWTP

SEQ ID NO: 3018 - skipped

SEQ ID NO: 3019 - protein, 38 aa, Homo sapiens
KGQDERTREASLRWWRVVFYAHTSGSHRQRWRSYSCRI

SEQ ID NO: 3020 - protein, 38 aa, Homo sapiens
KVQGHPAHFCHHGGVFHFLDTLQCGYPSLFLSIHLIWK

SEQ ID NO: 3021 - protein, 38 aa, Homo sapiens
LLKNSLQRLFVLELGVSLIQMTCRGWHTFWSTWYSWVV

SEQ ID NO: 3022 - protein, 38 aa, Homo sapiens
NFQFCHLQGDSLCSVGSWNTTCTFWILCALCSLDETCK

SEQ ID NO: 3023 - protein, 38 aa, Homo sapiens
RLPGLTCKVRRTLHQLKLCQRVMILSVVFQILMTCQWP

SEQ ID NO: 3024-3025 - skipped (2 entries)

SEQ ID NO: 3026 - protein, 37 aa, Homo sapiens
ISSRKGKGAKTKAQEIPSLWALLRAEKAFVCTRSADV

SEQ ID NO: 3027 - protein, 37 aa, Homo sapiens
KEKQPTTKDNQGSQQKCGISQDFKPWKIKAINSRKRC

SEQ ID NO: 3028 - skipped

SEQ ID NO: 3029 - protein, 37 aa, Homo sapiens
RKERNQFFTFFVIPVIVVLKIKKSMTNTCLNIQNALN

SEQ ID NO: 3030 - protein, 36 aa, Homo sapiens
KEVWDQKRCSKILVDEGSVQNFLHGAPEIIPTEASE

SEQ ID NO: 3031 - skipped

SEQ ID NO: 3032 - protein, 36 aa, Homo sapiens
LQNASLKLTREAVRNPAQKNPQPIYHHWIPREPTRS

SEQ ID NO: 3033 - protein, 36 aa, Homo sapiens
SWHCGCRRQRRAWRLPTPSAHRWRRPSCGYRQSQRM

SEQ ID NO: 3034 - protein, 35 aa, Homo sapiens
KFPDPGDKCHPRGPGGPHPQKEEEDLRVPHCLCPE

SEQ ID NO: 3035 - protein, 35 aa, Homo sapiens
KGQCCEARQGCHSPPPSPAPFCSGLGLCPRSTLPS

SEQ ID NO: 3036 - protein, 35 aa, Homo sapiens
KLAQRPLSELHSLLLRHLHGLGLAAGHGPPRQPGL

SEQ ID NO: 3037 - protein, 35 aa, Homo sapiens
KSHLLSTSFSNPGFCGVCGHSVRSNHIQSLQVEAV

SEQ ID NO: 3038 - protein, 35 aa, Homo sapiens
KYDLGRSTCRTTFPDPYSCLDQSKPKCVHLPRTLG

SEQ ID NO: 3039 - protein, 35 aa, Homo sapiens
MFTGNLSRSRARALPRSFLPSGFLQSEIPHAACAV

SEQ ID NO: 3040 - protein, 35 aa, Homo sapiens
RGSRSKTRGKNFRKEKNSREDKRERTATEEKARRN

SEQ ID NO: 3041 - protein, 34 aa, Homo sapiens
IAQLMKDQRIIKVPQIVCGLRIVLRKKRTVFLRQ

SEQ ID NO: 3042 - protein, 34 aa, Homo sapiens
IRVIEVARHKPLSKKKRKDRLRNLKKKKARILRK

SEQ ID NO: 3043 - protein, 34 aa, Homo sapiens
ISFRVLASSWYASLPSPSCNLWMPSTKIRLFTAI

SEQ ID NO: 3044 - protein, 34 aa, Homo sapiens
RQQSCDWKGSSSGDRKRTRARGTGCTASTTLWTT

SEQ ID NO: 3045 - protein, 33 aa, Homo sapiens
CGKSIWWLKELRVLMFLHLWDSMKQVALHQSNR

SEQ ID NO: 3046 - protein, 33 aa, Homo sapiens
IITVRGSITTMKGTDQGACLVTDQGLHLPGLTG

SEQ ID NO: 3047 - protein, 33 aa, Homo sapiens
KEKDIHLLIEKKNMEKTIITQVKKRKTRLKILD

SEQ ID NO: 3048 - protein, 33 aa, Homo sapiens
KFKTKTKSWPLCCCNRHSIVFLEWKRWLQKSTE

SEQ ID NO: 3049 - protein, 33 aa, Homo sapiens
KGLSSTHQGAQAVQYMQTCVGKRHKNNCVGSEV

SEQ ID NO: 3050 - protein, 33 aa, Homo sapiens
KPVNWTNSAICNKWEIVSMGTDQASHCRCATTL

SEQ ID NO: 3051 - protein, 33 aa, Homo sapiens
KRRRKQKRPQPKILSHRPRRKRRKRRRQQSRLY

SEQ ID NO: 3052 - protein, 33 aa, Homo sapiens
KVFCSSWWGYCYRMQTKCFSQGSYLLEKRNGDP

SEQ ID NO: 3053 - protein, 33 aa, Homo sapiens
KVHDRAAQKARAMERGIREQQPVLNLRDTTTSL

SEQ ID NO: 3054 - protein, 33 aa, Homo sapiens
MLEQIRALQETMQRWRSSERYMQKSSSLLHSIQ

SEQ ID NO: 3055 - protein, 33 aa, Homo sapiens
MLKSRQGTSGSTLTWAATWISTLLGLPSGVLWC

SEQ ID NO: 3056 - protein, 33 aa, Homo sapiens
NANQDFTFYPECDCNSKNYRACPPKDQVRGSVL

SEQ ID NO: 3057 - protein, 33 aa, Homo sapiens
SQKSQHHCALRKIEWATKLSLGGKAGPQAQEKA

SEQ ID NO: 3058 - protein, 33 aa, Homo sapiens
TCPFPDCERPFLFVTQQRTSLTAQRLQNQEGAL

SEQ ID NO: 3059 - protein, 33 aa, Homo sapiens
WILVNLFSGTSKAPFLCGGIDQTSQPSAGPRGT

SEQ ID NO: 3060 - skipped

SEQ ID NO: 3061 - protein, 32 aa, Homo sapiens
KHKYSWICFLTESGMEHFSTPVREDPWIWWTL

SEQ ID NO: 3062 - protein, 32 aa, Homo sapiens
KRSQGAAFFTNDKHVGHFDGLLPSQRFQLQQA

SEQ ID NO: 3063 - protein, 32 aa, Homo sapiens
MILFQLTFSCCLALSLTASAMWKQQNWMEKPI

SEQ ID NO: 3064 - protein, 32 aa, Homo sapiens
REPRERLYQDTSLMMIVLTIQNAAFLSNIRMA

SEQ ID NO: 3065 - protein, 32 aa, Homo sapiens
RGPRRKVLMVLWLPANQSLQKSQVFQWVLRTE

SEQ ID NO: 3066 - protein, 32 aa, Homo sapiens
SKRKLFLAFWLTVETRLFAVIHMFFGIFSGCI

SEQ ID NO: 3067 - protein, 32 aa, Homo sapiens
TRTREVSPRHSTLTASRRSSTASTSWEGWPPG

SEQ ID NO: 3068 - protein, 32 aa, Homo sapiens
YFVELMISMIQRVQQDQQIGSIKVDYHPHGFL

SEQ ID NO: 3069 - protein, 31 aa, Homo sapiens
ALYVKWRQIFTLQRRCQKKDQVTASFLLRLY

SEQ ID NO: 3070 - protein, 31 aa, Homo sapiens
IPSSSCALTLQMNKFSIIIINMCLHGNRMNT

SEQ ID NO: 3071 - protein, 31 aa, Homo sapiens
IQDQDQELATVLLQSALDCIFGVEEMATKKH

SEQ ID NO: 3072 - protein, 31 aa, Homo sapiens
KGQDERTREASFRWWRDVFYAHTSGPHRQRW

SEQ ID NO: 3073 - protein, 31 aa, Homo sapiens
LRVQLIFQLLPMDFKPQQGMLLVIIVYRHQL

SEQ ID NO: 3074 - protein, 31 aa, Homo sapiens
RATFLLALWECSLPQARLCLIVSRTLLLVQS

SEQ ID NO: 3075 - protein, 31 aa, Homo sapiens
SSRADGLLCSSKSTTEVIRNVAKDGRLAGRL

SEQ ID NO: 3076 - protein, 31 aa, Homo sapiens
TRMFIPAAAAPPPAQWETPAHTTLLLKAPTL

SEQ ID NO: 3077 - protein, 30 aa, Homo sapiens
KERKRESRPGGTGRATILFVTQTQDSKGKG

SEQ ID NO: 3078 - protein, 30 aa, Homo sapiens
KHLLCWMFSPVLFLLLFGYIRMLAFDCDGL

SEQ ID NO: 3079 - protein, 30 aa, Homo sapiens
QFEERERGKNESARNPGISPGACTLVPAAV

SEQ ID NO: 3080 - protein, 30 aa, Homo sapiens
RASVSFWTLLPTTGVRTRGSPLRLTLWPPR

SEQ ID NO: 3081 - protein, 30 aa, Homo sapiens
RESRAMISLGALREDWNQKRSLGQQIPVVI

SEQ ID NO: 3082 - protein, 30 aa, Homo sapiens
RNSYRMDQTFKILYLVILQTGAPGMNIKET

SEQ ID NO: 3083 - protein, 30 aa, Homo sapiens
RSQNHQKRKVLGTILVHNHIIDYAWVICHL

SEQ ID NO: 3084 - protein, 30 aa, Homo sapiens
TSQRIPCSLQKKMHLKYGLFSTFYLRTSIH

SEQ ID NO: 3085 - protein, 30 aa, Homo sapiens
VSVITMKLWEKHFKGLNWNLVVWILNLKMM

SEQ ID NO: 3086 - skipped

SEQ ID NO: 3087 - protein, 29 aa, Homo sapiens
IAFHIKSIAAALKRHFTVNMSKVETGLHV

SEQ ID NO: 3088 - protein, 29 aa, Homo sapiens
KHPAAAAERGRVCGSSTGASAHPSGGSLV

SEQ ID NO: 3089 - protein, 29 aa, Homo sapiens
MFNPSYGFQASGLQHTGVDRLWWTFHYTS

SEQ ID NO: 3090 - protein, 29 aa, Homo sapiens
QELKEAVKFSIVKNNSNNKCGIQPGLPIL

SEQ ID NO: 3091 - protein, 29 aa, Homo sapiens
RIYHLNICCLRRKFYYQEANLKRRNFKLK

SEQ ID NO: 3092 - protein, 29 aa, Homo sapiens
SKTESSEFSRTTNYSSFILDQPYPSFALT

SEQ ID NO: 3093 - skipped

SEQ ID NO: 3094 - protein, 29 aa, Homo sapiens
WMTMQTIIKTRSSTLERNRTEAMPREHLL

SEQ ID NO: 3095 - protein, 28 aa, Homo sapiens
IEALTALFTCRTASISVNISTLMSILEA

SEQ ID NO: 3096 - protein, 28 aa, Homo sapiens
IKRRMRMKTPPLLISVWKIFRKIKIRIV

SEQ ID NO: 3097 - protein, 28 aa, Homo sapiens
KEKEEVPANRKTTGKTRRKEKSYILTNR

SEQ ID NO: 3098 - protein, 28 aa, Homo sapiens
KFFFIILIFGKTSSRLLLPPGGGDRGGQ

SEQ ID NO: 3099 - protein, 28 aa, Homo sapiens
KGHCCIQGCVWFKFQPIHGNQTISYHSL

SEQ ID NO: 3100 - skipped

SEQ ID NO: 3101 - protein, 28 aa, Homo sapiens
LSINNYRFQMKFYFRFTSHGSPFTSANF

SEQ ID NO: 3102 - protein, 28 aa, Homo sapiens
QEPQKKGNQLKFLLSRDNSMQLLEPYCC

SEQ ID NO: 3103 - protein, 28 aa, Homo sapiens
RDQCFQMMEGKAFLPERKCFPGNQHPLG

SEQ ID NO: 3104 - protein, 28 aa, Homo sapiens
RQNKYMETRNATVTKTPFNSYNVVTCTM

SEQ ID NO: 3105 - protein, 28 aa, Homo sapiens
SFLVLRFMSQIILSEFWMCCGLVPTSSP

SEQ ID NO: 3106 - protein, 28 aa, Homo sapiens
TGTKHESGLLKTSQKLSLKKMTQGPCLG

SEQ ID NO: 3107 - skipped

SEQ ID NO: 3108 - protein, 27 aa, Homo sapiens
ALQVFSSTGLKRTLIERVSMDTAFRES

SEQ ID NO: 3109 - protein, 27 aa, Homo sapiens
GRISTWKPEMQQLLKHHLIVITSLLVL

SEQ ID NO: 3110 - skipped

SEQ ID NO: 3111 - protein, 27 aa, Homo sapiens
IILDTNSTNVKNVAKLLTSPQSLLPIR

SEQ ID NO: 3112 - protein, 27 aa, Homo sapiens
IKNSGSFWFVESSRGQGHHTVQRPHSS

SEQ ID NO: 3113 - protein, 27 aa, Homo sapiens
ISQREASNFWEAVDIICTPRTVPSAAE

SEQ ID NO: 3114 - protein, 27 aa, Homo sapiens
KGKNSPCCQKKLRVQNQGHLLMILLHN

SEQ ID NO: 3115 - protein, 27 aa, Homo sapiens
LLQKEIPLLQLSLLTDSKRNHGHPQLT

SEQ ID NO: 3116 - protein, 27 aa, Homo sapiens
MLKNVRGRRKKRKKKNNSKLKYRRKRK

SEQ ID NO: 3117 - protein, 27 aa, Homo sapiens
MLTALPPAMTAMCGYGIRGNPVQQWNI

SEQ ID NO: 3118 - protein, 27 aa, Homo sapiens
MYSRGRGANGKRKGRISNKKTRVDCTD

SEQ ID NO: 3119 - protein, 27 aa, Homo sapiens
PDNGGGSFWQEALLVLSLEQALPLWTV

SEQ ID NO: 3120 - protein, 27 aa, Homo sapiens
RGSGLTNGGVTERNWLPFGLFVVMYRT

SEQ ID NO: 3121 - protein, 27 aa, Homo sapiens
RKRNLSNMTIQTMKTVPSNFWKGALLH

SEQ ID NO: 3122 - protein, 27 aa, Homo sapiens
RRTKPAALSPVMVPRQKYQQRVKRSSA

SEQ ID NO: 3123 - protein, 26 aa, Homo sapiens
EIKVLKCLPSWKPKDLNNSPSLQWNL

SEQ ID NO: 3124 - protein, 26 aa, Homo sapiens
KAEKKVTQKTEEKQKGSHRYNSRFLE

SEQ ID NO: 3125 - protein, 26 aa, Homo sapiens
KCTVLIHVRLSGWIFAKKINSRCGSQ

SEQ ID NO: 3126 - protein, 26 aa, Homo sapiens
LVIPKLIILMEKTLTGCLRALKMNRF

SEQ ID NO: 3127 - protein, 26 aa, Homo sapiens
SLKRAEAKPSPHAAPICFLSHCTTEL

SEQ ID NO: 3128 - protein, 25 aa, Homo sapiens
ARQSLKGQAEDSSKSTLEKILNQMS

SEQ ID NO: 3129 - protein, 25 aa, Homo sapiens
IWWIVQNSFLLPFRMSSFPKKFFFL

SEQ ID NO: 3130 - protein, 25 aa, Homo sapiens
KASGKEGEGYEEMRFFSDMSSSRAP

SEQ ID NO: 3131 - protein, 25 aa, Homo sapiens
KEAQAAVPAETVGHFSQARTRAGLV

SEQ ID NO: 3132 - protein, 25 aa, Homo sapiens
KGKKETCGPRRKFTICSTRKCSILR

SEQ ID NO: 3133 - protein, 25 aa, Homo sapiens
KKKRKMKRKKMKKKTPKKIPRKRTR

SEQ ID NO: 3134 - protein, 25 aa, Homo sapiens
KSASTESNSSEKQICKAEGRLEKCL

SEQ ID NO: 3135 - protein, 25 aa, Homo sapiens
LTPVEKLRRKISELLLGNNMQPNSI

SEQ ID NO: 3136 - protein, 25 aa, Homo sapiens
NFAYCPRCGHDPGCPEIWTLPGYGD

SEQ ID NO: 3137 - protein, 25 aa, Homo sapiens
NNIPNKIRVRNGNRQWSTSKHWNEK

SEQ ID NO: 3138 - protein, 25 aa, Homo sapiens
NPGAADRPRRELLLQGNSAANKDLL

SEQ ID NO: 3139 - protein, 25 aa, Homo sapiens
PPVKESQVARRKCLKEMARRKKTEE

SEQ ID NO: 3140 - protein, 25 aa, Homo sapiens
RFQMQPLSLMPAHWSICLLRDSMIW

SEQ ID NO: 3141 - protein, 25 aa, Homo sapiens
RKKKRKPTGRYRQSNHPLRHPDARQ

SEQ ID NO: 3142 - protein, 25 aa, Homo sapiens
RKRGGTSQQEDHGEDQKEGEILYTH

SEQ ID NO: 3143 - protein, 25 aa, Homo sapiens
RNGNRIRLFGHHKHYKGSRGADQLI

SEQ ID NO: 3144 - protein, 24 aa, Homo sapiens
GKYLSPNRNLYRLLQKKKCLLIQN

SEQ ID NO: 3145 - protein, 24 aa, Homo sapiens
ILTMRQWLKNRSLERTHLLIIQNI

SEQ ID NO: 3146 - protein, 24 aa, Homo sapiens
KARRADERKTDRRTKKARGMFILP

SEQ ID NO: 3147 - protein, 24 aa, Homo sapiens
KEEKYRSRFYSKCLISIRSWIKTT

SEQ ID NO: 3148 - protein, 24 aa, Homo sapiens
KEKRLSTQLFPVHSNHQQRDYKRN

SEQ ID NO: 3149 - protein, 24 aa, Homo sapiens
KESSPIEPRDHNEPSISEHVCWNV

SEQ ID NO: 3150 - protein, 24 aa, Homo sapiens
KGQCCEARQPQAPLPTLHPAPPAP

SEQ ID NO: 3151 - protein, 24 aa, Homo sapiens
KPVYSSFHECLHNERSRCSDSYPL

SEQ ID NO: 3152 - skipped

SEQ ID NO: 3153 - protein, 24 aa, Homo sapiens
NHANFNFGMCNYIPPCLQWNIFSI

SEQ ID NO: 3154 - protein, 24 aa, Homo sapiens
RGASSSTSRDSRSFFTSAHPSRPC

SEQ ID NO: 3155 - protein, 24 aa, Homo sapiens
RLFWMRRLWCFRQLSGDISRGQSS

SEQ ID NO: 3156 - protein, 24 aa, Homo sapiens
RSTLLWLLSQRRMGIMSPNRSSKD

SEQ ID NO: 3157 - protein, 24 aa, Homo sapiens
SGEKFFRISKKKPKKTTNLVSCMD

SEQ ID NO: 3158 - protein, 24 aa, Homo sapiens
SKKPPQSKRTNGMKMNMKGPEGRR

SEQ ID NO: 3159 - protein, 24 aa, Homo sapiens
SSIHIVEKQLKLRERPTNKKKRKN

SEQ ID NO: 3160 - protein, 24 aa, Homo sapiens
TAGSFEKHDGSWRICLPSKHLRGR

SEQ ID NO: 3161 - protein, 24 aa, Homo sapiens
TEDHTKREQEIQISSQSAHCDSGR

SEQ ID NO: 3162 - protein, 24 aa, Homo sapiens
TILKNFLSVMVKMEDYPFLVWRNF

SEQ ID NO: 3163 - protein, 24 aa, Homo sapiens
TKEERYTGAAHPTFHTRCVFRTFN

SEQ ID NO: 3164 - protein, 24 aa, Homo sapiens
TQRRLKNWKEKKCIELNILISWRI

SEQ ID NO: 3165 - protein, 24 aa, Homo sapiens
TSPLLDVFSSFISSSLWVHQNACF

SEQ ID NO: 3166 - protein, 23 aa, Homo sapiens
FFMATGQLLFLIRLNLAAHSQCP

SEQ ID NO: 3167 - protein, 23 aa, Homo sapiens
FGRSLNLTVKWLVTSGKRVTSIR

SEQ ID NO: 3168 - protein, 23 aa, Homo sapiens
IICIKNMFLQRKGFLNLSHVEKF

SEQ ID NO: 3169 - skipped

SEQ ID NO: 3170 - protein, 23 aa, Homo sapiens
KHCSTYYRLFSRRKTKDIRLRHL

SEQ ID NO: 3171 - protein, 23 aa, Homo sapiens
KHHESFPLSCPPPHRCCLPCLLF

SEQ ID NO: 3172 - protein, 23 aa, Homo sapiens
KHLKAGCRSYTGAPQCPPPSSAG

SEQ ID NO: 3173 - skipped

SEQ ID NO: 3174 - protein, 23 aa, Homo sapiens
KYSGRAQTSKIREGRGRTLPESP

SEQ ID NO: 3175 - protein, 23 aa, Homo sapiens
LVCSALISLTLKGNLFTLLTLLM

SEQ ID NO: 3176 - protein, 23 aa, Homo sapiens
MFLIQRELLKTLNMIQVLMSVVH

SEQ ID NO: 3177 - protein, 23 aa, Homo sapiens
RFGMKVLPWVLTRLTNHPSWNSS

SEQ ID NO: 3178 - protein, 23 aa, Homo sapiens
RKTVLKNQKVSLLEISSKPRSKT

SEQ ID NO: 3179 - protein, 23 aa, Homo sapiens
RLRRINGRGSQIRSRNAFNRSEE

SEQ ID NO: 3180 - protein, 23 aa, Homo sapiens
SPFGSSCLQTSNNNMEKVTLKKV

SEQ ID NO: 3181 - protein, 23 aa, Homo sapiens
STSASCSSSFSLVMTLTLDTWRL

SEQ ID NO: 3182 - protein, 23 aa, Homo sapiens
TRFKQLAFRKRHFKFKDYFKSNN

SEQ ID NO: 3183 - protein, 23 aa, Homo sapiens
YSVEKTLKKFLVEHQVEKGLENC

SEQ ID NO: 3184 - protein, 22 aa, Homo sapiens
EKEENLGGLKWWQEAHAGLQKG

SEQ ID NO: 3185 - protein, 22 aa, Homo sapiens
HGILSFLMLQKIFQLFLWHVQN

SEQ ID NO: 3186 - protein, 22 aa, Homo sapiens
IAQLMKDQRIIKVAPLVEDKMI

SEQ ID NO: 3187 - protein, 22 aa, Homo sapiens
IPSRHMFSVTKIMLKETFKRRK

SEQ ID NO: 3188 - protein, 22 aa, Homo sapiens
IYETKERMIKCPRSGRNSVVCF

SEQ ID NO: 3189 - protein, 22 aa, Homo sapiens
KEEETAESSLRFNLPFRCYLWI

SEQ ID NO: 3190 - protein, 22 aa, Homo sapiens
KGPPSTCQERLYESRSRWPCIS

SEQ ID NO: 3191 - protein, 22 aa, Homo sapiens
KRLCGVLCPMVWSLQTVGSHLG

SEQ ID NO: 3192 - protein, 22 aa, Homo sapiens
KRSIGKGIFYLVSATIPSRHCL

SEQ ID NO: 3193 - protein, 22 aa, Homo sapiens
KSFNDGKQSVSSIPSVFLVWNR

SEQ ID NO: 3194 - protein, 22 aa, Homo sapiens
KVFFWPRKAQEGLMFKEDSLSV

SEQ ID NO: 3195 - protein, 22 aa, Homo sapiens
QGGKIHRRCTSHLSYQVCFQNI

SEQ ID NO: 3196 - protein, 22 aa, Homo sapiens
QKRRLKQLQIIMKMLMVMVFMK

SEQ ID NO: 3197 - protein, 22 aa, Homo sapiens
RKEKICRSSTWPIYKKNDSKNC

SEQ ID NO: 3198 - protein, 22 aa, Homo sapiens
RKTANYERQPREPTKMWHQSRL

SEQ ID NO: 3199 - protein, 22 aa, Homo sapiens
RRKIIPNCFWGKTESPSIFTTC

SEQ ID NO: 3200 - protein, 22 aa, Homo sapiens
RSQTKIHRSPSVLCHLLFRTTS

SEQ ID NO: 3201 - protein, 22 aa, Homo sapiens
RTNERRTEARGRDYARARRRRV

SEQ ID NO: 3202 - protein, 22 aa, Homo sapiens
SLTKLNKVRKKQKTDLMFKKKL

SEQ ID NO: 3203 - protein, 22 aa, Homo sapiens
SNCQLVTAVPNWNLFSTVLLHL

SEQ ID NO: 3204 - protein, 22 aa, Homo sapiens
SVSRPEACGIRTSLLVRRMRRQ

SEQ ID NO: 3205 - protein, 22 aa, Homo sapiens
TSAAGSRETKKQKGYNLHQAKD

SEQ ID NO: 3206 - protein, 22 aa, Homo sapiens
VLTFWMMTQNKRLSKLWTMKMS

SEQ ID NO: 3207 - protein, 21 aa, Homo sapiens
HLNQILEQKVSTAASYWESDL

SEQ ID NO: 3208 - protein, 21 aa, Homo sapiens
ILKKSSTSSLIESLFPFLDPL

SEQ ID NO: 3209 - protein, 21 aa, Homo sapiens
KDSQNCEDAQAIQNPQAPEAP

SEQ ID NO: 3210 - protein, 21 aa, Homo sapiens
KEVQGSQCTQEASFGLFPVLL

SEQ ID NO: 3211 - protein, 21 aa, Homo sapiens
KLRWHFRNPFHGQNYYQRLDL

SEQ ID NO: 3212 - protein, 21 aa, Homo sapiens
KVFPRSSRRRRVIEDTIGILH

SEQ ID NO: 3213 - protein, 21 aa, Homo sapiens
LGERVYKYNSTVKELRLSLLF

SEQ ID NO: 3214 - protein, 21 aa, Homo sapiens
LQIRLCLLHFLVRLPRQRLLS

SEQ ID NO: 3215 - protein, 21 aa, Homo sapiens
MLLVQDGMKHSHLLFMSQNWH

SEQ ID NO: 3216 - protein, 21 aa, Homo sapiens
MLTQTDSAWDLEIAEVLFHIQ

SEQ ID NO: 3217 - protein, 21 aa, Homo sapiens
MQKKKSSREIRKRRRMMMMRR

SEQ ID NO: 3218 - protein, 21 aa, Homo sapiens
NHYSERLRATDDKHRKAKSGG

SEQ ID NO: 3219 - protein, 21 aa, Homo sapiens
RENIYPQTETCTDFYRRKSVS

SEQ ID NO: 3220 - protein, 21 aa, Homo sapiens
RLAARVWMYQNSVLQKKMKDC

SEQ ID NO: 3221 - protein, 21 aa, Homo sapiens
RRRNSRKQSQVQLAIQVLLVD

SEQ ID NO: 3222 - protein, 21 aa, Homo sapiens
TEAFAFLNMKITKQLPRQGVG

SEQ ID NO: 3223 - protein, 21 aa, Homo sapiens
VTWMKRRRRNLILRKPEWIFK

SEQ ID NO: 3224 - protein, 20 aa, Homo sapiens
GKLSPRTAVGAARNIRSSSF

SEQ ID NO: 3225 - protein, 20 aa, Homo sapiens
IGSWSTCSQEPQKPHSFVGA

SEQ ID NO: 3226 - protein, 20 aa, Homo sapiens
KCCCNGPRACREQNSEQGGL

SEQ ID NO: 3227 - protein, 20 aa, Homo sapiens
KCCCNGPRACREQNSQQRGL

SEQ ID NO: 3228 - protein, 20 aa, Homo sapiens
KEASLPGPDCSIKLYPHLPV

SEQ ID NO: 3229 - protein, 20 aa, Homo sapiens
KEGAISLRLRLQGRFGRGQA

SEQ ID NO: 3230 - protein, 20 aa, Homo sapiens
KGQHFYWHCGSAACHRRGCV

SEQ ID NO: 3231 - protein, 20 aa, Homo sapiens
KSTATRGDWSSATTGDQPTS

SEQ ID NO: 3232 - protein, 20 aa, Homo sapiens
MQVRKTSLFYLDFLIGLSWK

SEQ ID NO: 3233 - protein, 20 aa, Homo sapiens
NAWCWFADLFPSHPLYTTGC

SEQ ID NO: 3234 - protein, 20 aa, Homo sapiens
RAFIHTPRSPGCSVYANMCW

SEQ ID NO: 3235 - protein, 20 aa, Homo sapiens
REKIINPTISCPFQSPTKRL

SEQ ID NO: 3236 - protein, 20 aa, Homo sapiens
REKWPLNLILIQIVQKLLIF

SEQ ID NO: 3237 - protein, 20 aa, Homo sapiens
RKPLLKCIKLRYKSCKKQLK

SEQ ID NO: 3238 - protein, 20 aa, Homo sapiens
SCKRRKSQRTCLCRTFEEVQ

SEQ ID NO: 3239 - protein, 20 aa, Homo sapiens
SINIQNSQFLNVGIQKNIRE

SEQ ID NO: 3240 - protein, 20 aa, Homo sapiens
SRTSQSWKAGKSWKIMRRNR

SEQ ID NO: 3241 - protein, 20 aa, Homo sapiens
STVREALSPVQHGKCRKRRN

SEQ ID NO: 3242 - protein, 20 aa, Homo sapiens
TFQMQRMWQIILHASTSSST

SEQ ID NO: 3243 - protein, 20 aa, Homo sapiens
TRHLGAAVSRHQTTIWRRLH

SEQ ID NO: 3244 - protein, 19 aa, Homo sapiens
IGSRKQRDKKAKRIQLASS

SEQ ID NO: 3245 - protein, 19 aa, Homo sapiens
IKDSQKNLSQRRNLMMMGT

SEQ ID NO: 3246 - protein, 19 aa, Homo sapiens
IKLELPLLMMALPWVWLTF

SEQ ID NO: 3247 - protein, 19 aa, Homo sapiens
KDADSYIEFGYSWKNHHLV

SEQ ID NO: 3248 - protein, 19 aa, Homo sapiens
KEACFKRLLAETCWNGNAL

SEQ ID NO: 3249 - protein, 19 aa, Homo sapiens
KEGLQDCRECHQWGNIRRK

SEQ ID NO: 3250 - protein, 19 aa, Homo sapiens
KEGRRSEISVFQGRKSSWE

SEQ ID NO: 3251 - protein, 19 aa, Homo sapiens
KPILQKKATKRFLFYLSKL

SEQ ID NO: 3252 - protein, 19 aa, Homo sapiens
KSCNNFISFRNTRWPAAGL

SEQ ID NO: 3253 - protein, 19 aa, Homo sapiens
KSSGLACLPILLRNVRIWR

SEQ ID NO: 3254 - protein, 19 aa, Homo sapiens
KYARGRDSLELLPKELEVI

SEQ ID NO: 3255 - protein, 19 aa, Homo sapiens
LGKSLHFVIIREFTKERAY

SEQ ID NO: 3256 - protein, 19 aa, Homo sapiens
LNVTCFVIFRRVRNELQKW

SEQ ID NO: 3257 - protein, 19 aa, Homo sapiens
MTWQICTSYSVLCPLVYLI

SEQ ID NO: 3258 - protein, 19 aa, Homo sapiens
RLHGSHNTKQTKVPQCTDS

SEQ ID NO: 3259 - protein, 19 aa, Homo sapiens
RSIFRGHRSWDLPIIVNLS

SEQ ID NO: 3260 - protein, 19 aa, Homo sapiens
SRKKGHTKNRRKAKRKPQI

SEQ ID NO: 3261 - protein, 19 aa, Homo sapiens
SWCLCCRLIAMKEMTWTKI

SEQ ID NO: 3262 - protein, 18 aa, Homo sapiens
AYPSEKSNKKISVLSFET

SEQ ID NO: 3263 - protein, 18 aa, Homo sapiens
GNPVQESPQHQMIQDAQG

SEQ ID NO: 3264 - protein, 18 aa, Homo sapiens
IPAEPTGCCAHPKVLPKL

SEQ ID NO: 3265 - protein, 18 aa, Homo sapiens
IQASTSPSSQHGCMRDLP

SEQ ID NO: 3266 - skipped

SEQ ID NO: 3267 - protein, 18 aa, Homo sapiens
KCHCYRELYLSNREDFEV

SEQ ID NO: 3268 - protein, 18 aa, Homo sapiens
KDWQQECGCIKTRCFRKK

SEQ ID NO: 3269 - protein, 18 aa, Homo sapiens
KGPPSTCQERLYESSGSW

SEQ ID NO: 3270 - protein, 18 aa, Homo sapiens
KQWEDPTSPANVIALLQT

SEQ ID NO: 3271 - protein, 18 aa, Homo sapiens
KVQPNASQAQQKPTTHGR

SEQ ID NO: 3272 - skipped

SEQ ID NO: 3273 - protein, 18 aa, Homo sapiens
MLFRTENSLWRESASFNL

SEQ ID NO: 3274 - protein, 18 aa, Homo sapiens
MTLKALVKTWTQFRNYPR

SEQ ID NO: 3275 - protein, 18 aa, Homo sapiens
NSRICDLSAIPKQWNYQP

SEQ ID NO: 3276 - protein, 18 aa, Homo sapiens
NWMWQFWRITIREKFIHK

SEQ ID NO: 3277 - protein, 18 aa, Homo sapiens
RKRRSKVKITLLHRTQKN

SEQ ID NO: 3278 - protein, 18 aa, Homo sapiens
RSHFRLGNSEMSSIRKKI

SEQ ID NO: 3279 - protein, 18 aa, Homo sapiens
YRKLYQKQLEKRIKHLCS

SEQ ID NO: 3280 - protein, 17 aa, Homo sapiens
AGTDQGTAGNNAKMEKQ

SEQ ID NO: 3281 - protein, 17 aa, Homo sapiens
IIVVENYIGIISCQMEL

SEQ ID NO: 3282 - protein, 17 aa, Homo sapiens
IWQDSRNIWKIGGLRSH

SEQ ID NO: 3283 - protein, 17 aa, Homo sapiens
KCRSYWTSWRTKEQSRL

SEQ ID NO: 3284 - protein, 17 aa, Homo sapiens
KPNKNTQITFSLMSFTL

SEQ ID NO: 3285 - protein, 17 aa, Homo sapiens
KPVPWCGGIGCERNNWG

SEQ ID NO: 3286 - protein, 17 aa, Homo sapiens
KQNQHPSPNLYCGQNKK

SEQ ID NO: 3287 - protein, 17 aa, Homo sapiens
NEERTKNSPLSSYGNNL

SEQ ID NO: 3288 - protein, 17 aa, Homo sapiens
NLGSIKGISDGENRTWL

SEQ ID NO: 3289 - protein, 17 aa, Homo sapiens
NPSPAEGASLWEEGFII

SEQ ID NO: 3290 - protein, 17 aa, Homo sapiens
NSTDWGWHCSSIMPCNF

SEQ ID NO: 3291 - protein, 17 aa, Homo sapiens
RLVRGRRLRTAENVKNN

SEQ ID NO: 3292 - protein, 17 aa, Homo sapiens
RQGEKRDQKGEERAQEG

SEQ ID NO: 3293 - protein, 17 aa, Homo sapiens
RQTLRTLSLRGMVPRTL

SEQ ID NO: 3294 - protein, 17 aa, Homo sapiens
RSCNFLSRTVGCFPSSC

SEQ ID NO: 3295 - protein, 17 aa, Homo sapiens
RSKKVSTRKNGGGLKRK

SEQ ID NO: 3296 - protein, 17 aa, Homo sapiens
SCRECHQTKETLASKED

SEQ ID NO: 3297 - protein, 17 aa, Homo sapiens
SDQNLFTEIILNPPKHQ

SEQ ID NO: 3298 - protein, 17 aa, Homo sapiens
SKSQKTCPQKNSAQTSC

SEQ ID NO: 3299 - protein, 17 aa, Homo sapiens
TLFNILQTLLSKKNKGH

SEQ ID NO: 3300 - protein, 16 aa, Homo sapiens
FSNAKNVANHFACFHI

SEQ ID NO: 3301 - protein, 16 aa, Homo sapiens
IPWMNLEPRLLNCCAL

SEQ ID NO: 3302 - protein, 16 aa, Homo sapiens
IPWMTFQRVCGKEEAS

SEQ ID NO: 3303 - protein, 16 aa, Homo sapiens
ITTRNSSIRASWRIEV

SEQ ID NO: 3304 - protein, 16 aa, Homo sapiens
KAPPLRPRLRLRGRLR

SEQ ID NO: 3305 - protein, 16 aa, Homo sapiens
KCCGNGPRVCRKQNSE

SEQ ID NO: 3306 - protein, 16 aa, Homo sapiens
KCRKRKAAEKSEKEEG

SEQ ID NO: 3307 - protein, 16 aa, Homo sapiens
KEAYSAATAAGISQLL

SEQ ID NO: 3308 - protein, 16 aa, Homo sapiens
KEEEKEETFKKIRGLC

SEQ ID NO: 3309 - protein, 16 aa, Homo sapiens
KEIFTYEINHPGSWHI

SEQ ID NO: 3310 - protein, 16 aa, Homo sapiens
KEKEKEAERGGRSYSI

SEQ ID NO: 3311 - protein, 16 aa, Homo sapiens
KGRTTAGSEQQDLEHR

SEQ ID NO: 3312 - skipped

SEQ ID NO: 3313 - protein, 16 aa, Homo sapiens
KTSSKAYRYKLLQLGR

SEQ ID NO: 3314 - protein, 16 aa, Homo sapiens
KVCQGRKPVGSEHHCL

SEQ ID NO: 3315 - protein, 16 aa, Homo sapiens
LGNMMFLKPMVKFRIC

SEQ ID NO: 3316 - protein, 16 aa, Homo sapiens
LKTFHMKCFLNLSQME

SEQ ID NO: 3317 - protein, 16 aa, Homo sapiens
LLKNSNCRACFCCGQS

SEQ ID NO: 3318 - protein, 16 aa, Homo sapiens
LWLIVLTQLVLNLVQE

SEQ ID NO: 3319 - protein, 16 aa, Homo sapiens
MPERLPNLKLGDMYFL

SEQ ID NO: 3320 - protein, 16 aa, Homo sapiens
MSPPFMPSRVLFMSRR

SEQ ID NO: 3321 - protein, 16 aa, Homo sapiens
NIFSNLLWKYTWNGDL

SEQ ID NO: 3322 - protein, 16 aa, Homo sapiens
REKRQAVNMMCQHTMI

SEQ ID NO: 3323 - protein, 16 aa, Homo sapiens
RERKFYWKRNFKATVK

SEQ ID NO: 3324 - protein, 16 aa, Homo sapiens
RESTLGNFWMKLLQLP

SEQ ID NO: 3325 - protein, 16 aa, Homo sapiens
RSQNHQKSPQALAMPW

SEQ ID NO: 3326 - protein, 16 aa, Homo sapiens
RVGSMSFEVPSTKRSV

SEQ ID NO: 3327 - protein, 16 aa, Homo sapiens
SSHMHNTSPCQMMSHL

SEQ ID NO: 3328 - protein, 15 aa, Homo sapiens
FRRDFRKFSNRMISL

SEQ ID NO: 3329 - protein, 15 aa, Homo sapiens
IHAMNVGNLSAGNQY

SEQ ID NO: 3330 - protein, 15 aa, Homo sapiens
IKEGAPRSPRKTEKG

SEQ ID NO: 3331 - protein, 15 aa, Homo sapiens
KAQGTDEFQELCRRT

SEQ ID NO: 3332 - protein, 15 aa, Homo sapiens
KEHPCHSGPYSQLPG

SEQ ID NO: 3333 - protein, 15 aa, Homo sapiens
KEKESFIGNETSRQQ

SEQ ID NO: 3334 - protein, 15 aa, Homo sapiens
KESHDCGGVSPFGKQ

SEQ ID NO: 3335 - protein, 15 aa, Homo sapiens
KFVMLFTWFSDSRRR

SEQ ID NO: 3336 - protein, 15 aa, Homo sapiens
KPHKESPAHYRRRCI

SEQ ID NO: 3337 - protein, 15 aa, Homo sapiens
KVNSCISSDYSYTSV

SEQ ID NO: 3338 - protein, 15 aa, Homo sapiens
KYGGSFKTPSYFPSE

SEQ ID NO: 3339 - protein, 15 aa, Homo sapiens
LKPYRSVLVLIKMFF

SEQ ID NO: 3340 - protein, 15 aa, Homo sapiens
LQKKEIAKNVFVQNI

SEQ ID NO: 3341 - skipped

SEQ ID NO: 3342 - protein, 15 aa, Homo sapiens
NRSYLCNESCEKRAC

SEQ ID NO: 3343 - protein, 15 aa, Homo sapiens
REYFLGLSWPSPEES

SEQ ID NO: 3344 - protein, 15 aa, Homo sapiens
RMILHFWKKKNAVIT

SEQ ID NO: 3345 - protein, 15 aa, Homo sapiens
RPENSQINSSLCNEA

SEQ ID NO: 3346 - protein, 15 aa, Homo sapiens
RRPPRLQRMPPVGKH

SEQ ID NO: 3347 - protein, 15 aa, Homo sapiens
RSVKRCKRSLPKGIV

SEQ ID NO: 3348 - protein, 15 aa, Homo sapiens
SLGIIWPKSGLILTA

SEQ ID NO: 3349 - protein, 15 aa, Homo sapiens
TESSAPGQPWGQQEI

SEQ ID NO: 3350 - protein, 15 aa, Homo sapiens
TKSTRKQEQRFRKRD

SEQ ID NO: 3351 - protein, 15 aa, Homo sapiens
TQLLLFIRQMYRIMV

SEQ ID NO: 3352 - protein, 15 aa, Homo sapiens
TWRKLADSLVCSWIT

SEQ ID NO: 3353 - skipped

SEQ ID NO: 3354 - protein, 14 aa, Homo sapiens
CWSQILTALWRGRV

SEQ ID NO: 3355 - protein, 14 aa, Homo sapiens
GNFQRTTCHSILSS

SEQ ID NO: 3356 - protein, 14 aa, Homo sapiens
IICIHIELLFLPLP

SEQ ID NO: 3357 - protein, 14 aa, Homo sapiens
ISETSLWQWQIGGK

SEQ ID NO: 3358 - protein, 14 aa, Homo sapiens
KCKFGRLLYSTWIF

SEQ ID NO: 3359 - protein, 14 aa, Homo sapiens
KCNYGIIRNEKTAS

SEQ ID NO: 3360 - protein, 14 aa, Homo sapiens
KDVCIEAYTSYSVS

SEQ ID NO: 3361 - protein, 14 aa, Homo sapiens
KEKDDVSHNQKCRI

SEQ ID NO: 3362 - protein, 14 aa, Homo sapiens
KENLWSCHPQKEVY

SEQ ID NO: 3363 - protein, 14 aa, Homo sapiens
KFRPAPPHLPSMGV

SEQ ID NO: 3364 - protein, 14 aa, Homo sapiens
KFWSKLWDSKETRL

SEQ ID NO: 3365 - protein, 14 aa, Homo sapiens
KGSQEKGCIRIPVS

SEQ ID NO: 3366 - protein, 14 aa, Homo sapiens
KHTWKCITDIRLLK

SEQ ID NO: 3367 - protein, 14 aa, Homo sapiens
KKDFSSKEVKTICS

SEQ ID NO: 3368 - protein, 14 aa, Homo sapiens
KMPRGLKDGGWSER

SEQ ID NO: 3369 - protein, 14 aa, Homo sapiens
KNRIKMYKLLFNYV

SEQ ID NO: 3370 - protein, 14 aa, Homo sapiens
KQEPPCTRLHGNIL

SEQ ID NO: 3371 - protein, 14 aa, Homo sapiens
KSPTNYKYNIHTDD

SEQ ID NO: 3372 - protein, 14 aa, Homo sapiens
KVRLQVALHLSPWS

SEQ ID NO: 3373 - protein, 14 aa, Homo sapiens
KYRVNSTIGTSSTV

SEQ ID NO: 3374 - skipped

SEQ ID NO: 3375 - protein, 14 aa, Homo sapiens
LNRLGLALLQHHAL

SEQ ID NO: 3376 - protein, 14 aa, Homo sapiens
MIRKIQKRRRTANR

SEQ ID NO: 3377 - protein, 14 aa, Homo sapiens
MKMACGKRSLLQEV

SEQ ID NO: 3378 - protein, 14 aa, Homo sapiens
NTHRESYYSQNSGH

SEQ ID NO: 3379 - protein, 14 aa, Homo sapiens
QIQFVTLGKSSVQT

SEQ ID NO: 3380 - protein, 14 aa, Homo sapiens
QQLKWTPHILKSAS

SEQ ID NO: 3381 - protein, 14 aa, Homo sapiens
RDHSEEGSGGPCAE

SEQ ID NO: 3382 - protein, 14 aa, Homo sapiens
RKEEESKKGLNQRF

SEQ ID NO: 3383 - protein, 14 aa, Homo sapiens
RKENTVKRPNLPHL

SEQ ID NO: 3384 - protein, 14 aa, Homo sapiens
RKLYAHKTRNRKFK

SEQ ID NO: 3385 - protein, 14 aa, Homo sapiens
RRKNKKQPTFFLWQ

SEQ ID NO: 3386 - protein, 14 aa, Homo sapiens
SIFLAKESSGRAYV

SEQ ID NO: 3387 - protein, 14 aa, Homo sapiens
SKEADGIASFGRKK

SEQ ID NO: 3388 - protein, 14 aa, Homo sapiens
SSLKQKEKKRFKEC

SEQ ID NO: 3389 - protein, 14 aa, Homo sapiens
TFRYKGKQHPFFST

SEQ ID NO: 3390 - protein, 14 aa, Homo sapiens
TKPTSFPEPLLWTK

SEQ ID NO: 3391 - protein, 14 aa, Homo sapiens
TKSGKKQELTFLLL

SEQ ID NO: 3392 - protein, 14 aa, Homo sapiens
TVLSLVTISRFVLS

SEQ ID NO: 3393 - protein, 13 aa, Homo sapiens
CICSSIGRPGICC

SEQ ID NO: 3394 - protein, 13 aa, Homo sapiens
GHLLLDYKRRLWN

SEQ ID NO: 3395 - protein, 13 aa, Homo sapiens
HQRCAASQQSASF

SEQ ID NO: 3396 - protein, 13 aa, Homo sapiens
IAWSPWHENFRSR

SEQ ID NO: 3397 - protein, 13 aa, Homo sapiens
IKGGKGGNVPAKF

SEQ ID NO: 3398 - protein, 13 aa, Homo sapiens
IPSLNAQWMFLRI

SEQ ID NO: 3399 - protein, 13 aa, Homo sapiens
ISFGCESTLRSSH

SEQ ID NO: 3400 - skipped

SEQ ID NO: 3401 - protein, 13 aa, Homo sapiens
KAGKRRRGNKSQR

SEQ ID NO: 3402 - protein, 13 aa, Homo sapiens
KCRHLLCPAGYSS

SEQ ID NO: 3403 - protein, 13 aa, Homo sapiens
KGGSARQCGSCYT

SEQ ID NO: 3404 - protein, 13 aa, Homo sapiens
KLSFCCLSGRCTG

SEQ ID NO: 3405 - protein, 13 aa, Homo sapiens
KQGPGRSHPGTVH

SEQ ID NO: 3406 - protein, 13 aa, Homo sapiens
KSNPGQVCTPNFL

SEQ ID NO: 3407 - protein, 13 aa, Homo sapiens
KSWSEPVPKCAIQ

SEQ ID NO: 3408 - protein, 13 aa, Homo sapiens
LAGFQEYMEDWGT

SEQ ID NO: 3409 - protein, 13 aa, Homo sapiens
MKSIWRANSSQSK

SEQ ID NO: 3410 - protein, 13 aa, Homo sapiens
NKFSGTYTRNTKQ

SEQ ID NO: 3411 - protein, 13 aa, Homo sapiens
NSKLLYFCGQSEY

SEQ ID NO: 3412 - protein, 13 aa, Homo sapiens
RCSLMEQIPHLKS

SEQ ID NO: 3413 - protein, 13 aa, Homo sapiens
RNPRKTKITEEEN

SEQ ID NO: 3414 - protein, 13 aa, Homo sapiens
RRSKIEASPIGSI

SEQ ID NO: 3415 - protein, 13 aa, Homo sapiens
RSLGPKKMFQNPG

SEQ ID NO: 3416 - protein, 13 aa, Homo sapiens
RVGFEVPSTKRSV

SEQ ID NO: 3417 - protein, 13 aa, Homo sapiens
SGSQSGTKMKATH

SEQ ID NO: 3418 - protein, 13 aa, Homo sapiens
SPSLQTQWRLKRS

SEQ ID NO: 3419 - protein, 13 aa, Homo sapiens
TARSHRRAREQTV

SEQ ID NO: 3420 - protein, 13 aa, Homo sapiens
TGGRICKQKQVYI

SEQ ID NO: 3421 - protein, 13 aa, Homo sapiens
TLIGTCPKSLLCH

SEQ ID NO: 3422 - protein, 13 aa, Homo sapiens
TLNWKRGPSVVPW

SEQ ID NO: 3423 - protein, 13 aa, Homo sapiens
TMSLSNILMKFRL

SEQ ID NO: 3424 - protein, 13 aa, Homo sapiens
WKQLHSSGNVLNG

SEQ ID NO: 3425 - protein, 13 aa, Homo sapiens
YNKEFLHQGQLEN

SEQ ID NO: 3426 - protein, 12 aa, Homo sapiens
GLNKMNSGWSLK

SEQ ID NO: 3427 - protein, 12 aa, Homo sapiens
IGGLSPGHRGRN

SEQ ID NO: 3428 - protein, 12 aa, Homo sapiens
IKASIIFRYFYS

SEQ ID NO: 3429 - protein, 12 aa, Homo sapiens
ISEETSGNSQTE

SEQ ID NO: 3430 - protein, 12 aa, Homo sapiens
ISNKLQIQHPHR

SEQ ID NO: 3431 - protein, 12 aa, Homo sapiens
IVIILVLDLDLP

SEQ ID NO: 3432 - protein, 12 aa, Homo sapiens
KAAICTTPALVK

SEQ ID NO: 3433 - protein, 12 aa, Homo sapiens
KCCRSNAVTTWL

SEQ ID NO: 3434 - protein, 12 aa, Homo sapiens
KCFVCSLLLHSK

SEQ ID NO: 3435 - skipped

SEQ ID NO: 3436 - protein, 12 aa, Homo sapiens
KEKKGTSFSLFL

SEQ ID NO: 3437 - protein, 12 aa, Homo sapiens
KEVKTTRKVHKP

SEQ ID NO: 3438 - protein, 12 aa, Homo sapiens
KGESLLGGDCAV

SEQ ID NO: 3439 - protein, 12 aa, Homo sapiens
KGGDDSRGKVSV

SEQ ID NO: 3440 - protein, 12 aa, Homo sapiens
KGVPKDRDCEGS

SEQ ID NO: 3441 - protein, 12 aa, Homo sapiens
KLINLNLFMKHY

SEQ ID NO: 3442 - protein, 12 aa, Homo sapiens
KLQNEYKLWARE

SEQ ID NO: 3443 - skipped

SEQ ID NO: 3444 - protein, 12 aa, Homo sapiens
LIWQVFLKMILG

SEQ ID NO: 3445 - protein, 12 aa, Homo sapiens
LPRNLFQMSTSF

SEQ ID NO: 3446 - protein, 12 aa, Homo sapiens
LQRMSSDKRNTG

SEQ ID NO: 3447 - protein, 12 aa, Homo sapiens
METQFRSPLNIR

SEQ ID NO: 3448 - protein, 12 aa, Homo sapiens
MKKENKIKWKLN

SEQ ID NO: 3449 - protein, 12 aa, Homo sapiens
NRSNKVFRRYLW

SEQ ID NO: 3450 - protein, 12 aa, Homo sapiens
NSLLPAATEDLK

SEQ ID NO: 3451 - protein, 12 aa, Homo sapiens
PPLRFNLILMMY

SEQ ID NO: 3452 - skipped

SEQ ID NO: 3453 - protein, 12 aa, Homo sapiens
RKLLNQKKKLRK

SEQ ID NO: 3454 - protein, 12 aa, Homo sapiens
RLRIPSLRKYRQ

SEQ ID NO: 3455 - protein, 12 aa, Homo sapiens
RLRKKRKRRRRK

SEQ ID NO: 3456 - protein, 12 aa, Homo sapiens
RQENTNIFIGNT

SEQ ID NO: 3457 - protein, 12 aa, Homo sapiens
RRGRTARAARRN

SEQ ID NO: 3458 - protein, 12 aa, Homo sapiens
SEIGRQKLNSIW

SEQ ID NO: 3459 - protein, 12 aa, Homo sapiens
SISKIFSTKKSH

SEQ ID NO: 3460 - protein, 12 aa, Homo sapiens
SREKLLKPNKGL

SEQ ID NO: 3461 - protein, 12 aa, Homo sapiens
SRKCSKTSRKKK

SEQ ID NO: 3462 - protein, 12 aa, Homo sapiens
SRKHQRHFRWRK

SEQ ID NO: 3463 - protein, 12 aa, Homo sapiens
SSGVPSEAGYSI

SEQ ID NO: 3464 - protein, 12 aa, Homo sapiens
SVTFTIGIICLF

SEQ ID NO: 3465 - protein, 12 aa, Homo sapiens
SWEKEFTSTTAQ

SEQ ID NO: 3466 - protein, 12 aa, Homo sapiens
TKKWRKTVMAAT

SEQ ID NO: 3467 - protein, 12 aa, Homo sapiens
TLVMVATVKLFL

SEQ ID NO: 3468 - protein, 12 aa, Homo sapiens
TTGLVNFQLVSF

SEQ ID NO: 3469 - protein, 11 aa, Homo sapiens
FLFHNVVLLEE

SEQ ID NO: 3470 - protein, 11 aa, Homo sapiens
IGNNCTAAEMS

SEQ ID NO: 3471 - protein, 11 aa, Homo sapiens
ITFSCVMQPKS

SEQ ID NO: 3472 - protein, 11 aa, Homo sapiens
IYSRKKSHYSS

SEQ ID NO: 3473 - protein, 11 aa, Homo sapiens
KAEAKEVLCLL

SEQ ID NO: 3474 - protein, 11 aa, Homo sapiens
KEEQNQPLSAR

SEQ ID NO: 3475 - protein, 11 aa, Homo sapiens
KERTEGQKTEF

SEQ ID NO: 3476 - protein, 11 aa, Homo sapiens
KEVKTTRKEKF

SEQ ID NO: 3477 - protein, 11 aa, Homo sapiens
KLFPKSDTEKI

SEQ ID NO: 3478 - protein, 11 aa, Homo sapiens
KLFPKSDTENI

SEQ ID NO: 3479 - protein, 11 aa, Homo sapiens
KSGSSATGMDD

SEQ ID NO: 3480 - protein, 11 aa, Homo sapiens
KSKIGVLHTCL

SEQ ID NO: 3481 - protein, 11 aa, Homo sapiens
KSVNSDGHEMH

SEQ ID NO: 3482 - protein, 11 aa, Homo sapiens
LINPDKKIKMI

SEQ ID NO: 3483 - protein, 11 aa, Homo sapiens
LTSLQKLKSPK

SEQ ID NO: 3484 - skipped

SEQ ID NO: 3485 - protein, 11 aa, Homo sapiens
MMRCRRHRTGS

SEQ ID NO: 3486 - protein, 11 aa, Homo sapiens
MNLPFGSFMSQ

SEQ ID NO: 3487 - protein, 11 aa, Homo sapiens
MSLLQRTVSQQ

SEQ ID NO: 3488 - protein, 11 aa, Homo sapiens
MWRRSIGSGSQ

SEQ ID NO: 3489 - protein, 11 aa, Homo sapiens
NEGLSTEKTAE

SEQ ID NO: 3490 - protein, 11 aa, Homo sapiens
NENRQVCTCCN

SEQ ID NO: 3491 - protein, 11 aa, Homo sapiens
QDRIFRVFQNH

SEQ ID NO: 3492 - protein, 11 aa, Homo sapiens
RASFDLPGKAL

SEQ ID NO: 3493 - protein, 11 aa, Homo sapiens
RILLGTFLAIP

SEQ ID NO: 3494 - protein, 11 aa, Homo sapiens
RRLIYRGNNYR

SEQ ID NO: 3495 - protein, 11 aa, Homo sapiens
RRNLQRNLKVL

SEQ ID NO: 3496 - protein, 11 aa, Homo sapiens
RSQPSWSRLFH

SEQ ID NO: 3497 - protein, 11 aa, Homo sapiens
SFSKQWQNFTF

SEQ ID NO: 3498 - protein, 11 aa, Homo sapiens
SLVMKGQIPVR

SEQ ID NO: 3499 - protein, 11 aa, Homo sapiens
SSGRRTRKDLP

SEQ ID NO: 3500 - protein, 11 aa, Homo sapiens
SSLWLLVSFYS

SEQ ID NO: 3501 - protein, 11 aa, Homo sapiens
SYALSNKNLLI

SEQ ID NO: 3502 - protein, 11 aa, Homo sapiens
SYMKHTLGLNF

SEQ ID NO: 3503 - protein, 11 aa, Homo sapiens
TATKIYSQRSY

SEQ ID NO: 3504 - skipped

SEQ ID NO: 3505 - protein, 11 aa, Homo sapiens
TEAKAPEVNTS

SEQ ID NO: 3506 - protein, 11 aa, Homo sapiens
TFQMHRMWQSF

SEQ ID NO: 3507 - protein, 11 aa, Homo sapiens
THPCTMLLPQG

SEQ ID NO: 3508 - protein, 11 aa, Homo sapiens
TLNWKRNLLFG

SEQ ID NO: 3509 - protein, 11 aa, Homo sapiens
YLEIILFHSMR

SEQ ID NO: 3510 - protein, 11 aa, Homo sapiens
YMMKKLLNSHT

SEQ ID NO: 3511 - protein, 10 aa, Homo sapiens
ASSPGHPLGP

SEQ ID NO: 3512 - protein, 10 aa, Homo sapiens
EVTRCCFFHK

SEQ ID NO: 3513 - protein, 10 aa, Homo sapiens
FFTTCGNRRS

SEQ ID NO: 3514 - protein, 10 aa, Homo sapiens
FQAPLLLWTK

SEQ ID NO: 3515 - protein, 10 aa, Homo sapiens
IAMTMDQYPF

SEQ ID NO: 3516 - protein, 10 aa, Homo sapiens
IEITPQRSKA

SEQ ID NO: 3517 - protein, 10 aa, Homo sapiens
IKALLTLNSL

SEQ ID NO: 3518 - protein, 10 aa, Homo sapiens
IKGNISKSST

SEQ ID NO: 3519 - protein, 10 aa, Homo sapiens
IRSHRRKETS

SEQ ID NO: 3520 - protein, 10 aa, Homo sapiens
ISDFKAPILL

SEQ ID NO: 3521 - protein, 10 aa, Homo sapiens
KANSHCEHHL

SEQ ID NO: 3522 - protein, 10 aa, Homo sapiens
KAQAYKPSGD

SEQ ID NO: 3523 - protein, 10 aa, Homo sapiens
KARRVSTIVL

SEQ ID NO: 3524 - skipped

SEQ ID NO: 3525 - protein, 10 aa, Homo sapiens
KEEKVQSPGI

SEQ ID NO: 3526 - protein, 10 aa, Homo sapiens
KEETTQDSNK

SEQ ID NO: 3527 - protein, 10 aa, Homo sapiens
KFCHIIYSVS

SEQ ID NO: 3528 - protein, 10 aa, Homo sapiens
KLGQSTRAVY

SEQ ID NO: 3529 - protein, 10 aa, Homo sapiens
KPFKFSVQLD

SEQ ID NO: 3530 - protein, 10 aa, Homo sapiens
KQISRSSQSL

SEQ ID NO: 3531 - protein, 10 aa, Homo sapiens
KRSIGKESQD

SEQ ID NO: 3532 - protein, 10 aa, Homo sapiens
KRSIGKEVLL

SEQ ID NO: 3533 - protein, 10 aa, Homo sapiens
LDVAILENYD

SEQ ID NO: 3534 - protein, 10 aa, Homo sapiens
LGNHWILLVS

SEQ ID NO: 3535 - protein, 10 aa, Homo sapiens
LLPSFKMKEL

SEQ ID NO: 3536 - protein, 10 aa, Homo sapiens
LWTIRNYLLH

SEQ ID NO: 3537 - protein, 10 aa, Homo sapiens
MGNSFSKENP

SEQ ID NO: 3538 - protein, 10 aa, Homo sapiens
NIWRSSYSTV

SEQ ID NO: 3539 - protein, 10 aa, Homo sapiens
NLGQSEDCKI

SEQ ID NO: 3540 - protein, 10 aa, Homo sapiens
NLIQFPKDSP

SEQ ID NO: 3541 - protein, 10 aa, Homo sapiens
NNYAGNEGIK

SEQ ID NO: 3542 - protein, 10 aa, Homo sapiens
NPAKTRIWHC

SEQ ID NO: 3543 - protein, 10 aa, Homo sapiens
NSVSTTTGFR

SEQ ID NO: 3544 - protein, 10 aa, Homo sapiens
NSWSQIAGRH

SEQ ID NO: 3545 - protein, 10 aa, Homo sapiens
NTERPKIRTN

SEQ ID NO: 3546 - protein, 10 aa, Homo sapiens
NYKRPWINQP

SEQ ID NO: 3547 - protein, 10 aa, Homo sapiens
PRHWISCLKK

SEQ ID NO: 3548 - protein, 10 aa, Homo sapiens
RLPCKVTESS

SEQ ID NO: 3549 - protein, 10 aa, Homo sapiens
RNTNTPGSAS

SEQ ID NO: 3550 - protein, 10 aa, Homo sapiens
SLFRETQSNR

SEQ ID NO: 3551 - protein, 10 aa, Homo sapiens
SLILSFQRVK

SEQ ID NO: 3552 - protein, 10 aa, Homo sapiens
SQSKDQYNGT

SEQ ID NO: 3553 - protein, 10 aa, Homo sapiens
SRGQRSLVSA

SEQ ID NO: 3554 - protein, 10 aa, Homo sapiens
TCPLVRWNRM

SEQ ID NO: 3555 - protein, 10 aa, Homo sapiens
TSYRHENACF

SEQ ID NO: 3556 - protein, 10 aa, Homo sapiens
TTSQSQLSSE

SEQ ID NO: 3557 - protein, 10 aa, Homo sapiens
VPLTKLSEVF

SEQ ID NO: 3558 - protein, 9 aa, Homo sapiens
CKPRFHFLP

SEQ ID NO: 3559 - protein, 9 aa, Homo sapiens
IESWTSLHP

SEQ ID NO: 3560 - protein, 9 aa, Homo sapiens
IFFSTMWFS

SEQ ID NO: 3561 - protein, 9 aa, Homo sapiens
IFSLIMKSQ

SEQ ID NO: 3562 - protein, 9 aa, Homo sapiens
IKIGKKHQR

SEQ ID NO: 3563 - protein, 9 aa, Homo sapiens
IRHAFYLVL

SEQ ID NO: 3564 - protein, 9 aa, Homo sapiens
IRKTSQVLT

SEQ ID NO: 3565 - skipped

SEQ ID NO: 3566 - protein, 9 aa, Homo sapiens
KAEIARRKR

SEQ ID NO: 3567 - protein, 9 aa, Homo sapiens
KDSRCNPSP

SEQ ID NO: 3568 - protein, 9 aa, Homo sapiens
KEASSEVHS

SEQ ID NO: 3569 - protein, 9 aa, Homo sapiens
KECQEEADS

SEQ ID NO: 3570 - protein, 9 aa, Homo sapiens
KEKVQSPGI

SEQ ID NO: 3571 - skipped

SEQ ID NO: 3572 - protein, 9 aa, Homo sapiens
KFQHKSAGI

SEQ ID NO: 3573 - protein, 9 aa, Homo sapiens
KKRKKTSVD

SEQ ID NO: 3574 - skipped

SEQ ID NO: 3575 - protein, 9 aa, Homo sapiens
KPNLERSKS

SEQ ID NO: 3576 - protein, 9 aa, Homo sapiens
KYDRKFLFV

SEQ ID NO: 3577 - protein, 9 aa, Homo sapiens
KYKQQNSTG

SEQ ID NO: 3578 - protein, 9 aa, Homo sapiens
KYQAGICSV

SEQ ID NO: 3579 - protein, 9 aa, Homo sapiens
LCLLSEMWP

SEQ ID NO: 3580 - protein, 9 aa, Homo sapiens
LRLAVLVNN

SEQ ID NO: 3581 - protein, 9 aa, Homo sapiens
MFCLQFVIA

SEQ ID NO: 3582 - protein, 9 aa, Homo sapiens
MKSKTSCVV

SEQ ID NO: 3583 - protein, 9 aa, Homo sapiens
QHLLEVNPY

SEQ ID NO: 3584 - protein, 9 aa, Homo sapiens
QLTRDWKAS

SEQ ID NO: 3585 - protein, 9 aa, Homo sapiens
RGTKSMKVT

SEQ ID NO: 3586 - protein, 9 aa, Homo sapiens
RKKGNMWTT

SEQ ID NO: 3587 - protein, 9 aa, Homo sapiens
RKKRIFTYS

SEQ ID NO: 3588 - protein, 9 aa, Homo sapiens
SKIKSPFTH

SEQ ID NO: 3589 - protein, 9 aa, Homo sapiens
SLITQMMKH

SEQ ID NO: 3590 - protein, 9 aa, Homo sapiens
SRTLMKMIS

SEQ ID NO: 3591 - protein, 9 aa, Homo sapiens
SSSWTKTMG

SEQ ID NO: 3592 - protein, 9 aa, Homo sapiens
SVWQRRRRI

SEQ ID NO: 3593 - protein, 9 aa, Homo sapiens
TFNMPYKSQ

SEQ ID NO: 3594 - skipped

SEQ ID NO: 3595 - protein, 9 aa, Homo sapiens
TVGRPHISC

SEQ ID NO: 3596 - protein, 9 aa, Homo sapiens
WRPFPWAQR

SEQ ID NO: 3597 - protein, 9 aa, Homo sapiens
WVNTPRRRL

SEQ ID NO: 3598 - protein, 8 aa, Homo sapiens
DFFQGLQI

SEQ ID NO: 3599 - protein, 8 aa, Homo sapiens
DPAGKLKK

SEQ ID NO: 3600 - protein, 8 aa, Homo sapiens
FHIKVATQ

SEQ ID NO: 3601 - protein, 8 aa, Homo sapiens
FSILPSSR

SEQ ID NO: 3602 - protein, 8 aa, Homo sapiens
ICQVIKRL

SEQ ID NO: 3603 - protein, 8 aa, Homo sapiens
IKLGPEML

SEQ ID NO: 3604 - protein, 8 aa, Homo sapiens
ISPTSQYN

SEQ ID NO: 3605 - protein, 8 aa, Homo sapiens
ISTQICWN

SEQ ID NO: 3606 - protein, 8 aa, Homo sapiens
IVVPKRNI

SEQ ID NO: 3607 - protein, 8 aa, Homo sapiens
KAEENWQR

SEQ ID NO: 3608 - protein, 8 aa, Homo sapiens
KCQKGSPT

SEQ ID NO: 3609 - protein, 8 aa, Homo sapiens
KDWCEEEG

SEQ ID NO: 3610 - protein, 8 aa, Homo sapiens
KEGIFKGT

SEQ ID NO: 3611 - protein, 8 aa, Homo sapiens
KEVRCSGC

SEQ ID NO: 3612 - skipped

SEQ ID NO: 3613 - protein, 8 aa, Homo sapiens
KFLRAAVH

SEQ ID NO: 3614 - protein, 8 aa, Homo sapiens
KGGQEGRF

SEQ ID NO: 3615 - protein, 8 aa, Homo sapiens
KNFERESF

SEQ ID NO: 3616 - protein, 8 aa, Homo sapiens
KPKNGERQ

SEQ ID NO: 3617 - protein, 8 aa, Homo sapiens
KPLHQAIL

SEQ ID NO: 3618 - protein, 8 aa, Homo sapiens
KSEKQARS

SEQ ID NO: 3619 - protein, 8 aa, Homo sapiens
KSRQSIPP

SEQ ID NO: 3620 - protein, 8 aa, Homo sapiens
KYFDIQNI

SEQ ID NO: 3621 - protein, 8 aa, Homo sapiens
LKLAEVGS

SEQ ID NO: 3622 - protein, 8 aa, Homo sapiens
LVLLNWLP

SEQ ID NO: 3623 - protein, 8 aa, Homo sapiens
MEDMIWES

SEQ ID NO: 3624 - protein, 8 aa, Homo sapiens
MKKRIMVH

SEQ ID NO: 3625 - protein, 8 aa, Homo sapiens
NHGTGSVV

SEQ ID NO: 3626 - protein, 8 aa, Homo sapiens
NPGVSAAG

SEQ ID NO: 3627 - protein, 8 aa, Homo sapiens
NQRKISCS

SEQ ID NO: 3628 - protein, 8 aa, Homo sapiens
NTLRTECC

SEQ ID NO: 3629 - protein, 8 aa, Homo sapiens
NYQETYSR

SEQ ID NO: 3630 - protein, 8 aa, Homo sapiens
QLLNLIAL

SEQ ID NO: 3631 - skipped

SEQ ID NO: 3632 - protein, 8 aa, Homo sapiens
QTLQEFVI

SEQ ID NO: 3633 - protein, 8 aa, Homo sapiens
REYGHSCS

SEQ ID NO: 3634 - protein, 8 aa, Homo sapiens
RNWLRSWL

SEQ ID NO: 3635 - protein, 8 aa, Homo sapiens
RRMVLLKS

SEQ ID NO: 3636 - protein, 8 aa, Homo sapiens
SHSLSSVL

SEQ ID NO: 3637 - protein, 8 aa, Homo sapiens
SHSRGLRW

SEQ ID NO: 3638 - protein, 8 aa, Homo sapiens
SILGMAQG

SEQ ID NO: 3639 - protein, 8 aa, Homo sapiens
SKMTQIIQ

SEQ ID NO: 3640 - protein, 8 aa, Homo sapiens
SVGRAFGG

SEQ ID NO: 3641 - protein, 8 aa, Homo sapiens
SWKKKKRK

SEQ ID NO: 3642 - protein, 8 aa, Homo sapiens
THQSRKVK

SEQ ID NO: 3643 - skipped

SEQ ID NO: 3644 - protein, 8 aa, Homo sapiens
WNLLFLRR

SEQ ID NO: 3645 - protein, 8 aa, Homo sapiens
YRKTKNQN

SEQ ID NO: 3646 - protein, 79 aa, Homo sapiens
KYCHLRLPSQAPLKGKRAQNQAQPNLLPQNQHHLLRQWTQTVQAPRFPLLKSRSSWIQPLWSQELWMPSQWRVLEILTN

SEQ ID NO: 3647 - protein, 77 aa, Homo sapiens
KMEGSQADEKTGAAAGTGGTGKAPGRGGGSGREGGPRAALHTERSPAGLHPGQCSVAGASHLLGRSDCQSLCHLLCG

SEQ ID NO: 3648 - protein, 75 aa, Homo sapiens
NLDLQHQRRRKKKKDKVEIRNRSPKANSTECQGEHSREQNLLNLVQLNPHSPHHRKDEEDHQKRHHHHNQKKMSV

SEQ ID NO: 3649 - protein, 74 aa, Homo sapiens
KFLIHLRKVDTHHLQVVTKTVTATTADGQRMRRLKCKACRLRWARPEPAAQAPPKSHFPPHPSGPSRTSSLQLR

SEQ ID NO: 3650-3651 - skipped (2 entries)

SEQ ID NO: 3652 - protein, 64 aa, Homo sapiens
NYGHCNSPLAFLTQLLPRPTSNPWWMTRRDPFCGGNLISTKLENFVSGISAGTERRQMNLCFLY

SEQ ID NO: 3653 - protein, 63 aa, Homo sapiens
KTGSNEVTTRYEEKKTGSVRKANRMPKDVNIQVRKKQKHETRRKSKYNEDFERAWREDLTIKR

SEQ ID NO: 3654 - protein, 62 aa, Homo sapiens
MCSSLALPTGLTSLILPSSDLAVLISSSTSHFLMRSPVLPSSRLTCASPQLPRMWTWSSWLK

SEQ ID NO: 3655 - skipped

SEQ ID NO: 3656 - protein, 58 aa, Homo sapiens
VIAILSSMCQEILNRHHRRKEVRKLKQILFQVEETKSGRFWIKHDLVSCLQSYLVMEA

SEQ ID NO: 3657 - protein, 57 aa, Homo sapiens
KQWSSVTSLEWTAQERGCSSWLMKQTWMKSWSLRDPSYRSILEYVSTRVLWMPTSTV

SEQ ID NO: 3658 - protein, 53 aa, Homo sapiens
ALRSMPKSRNQVLFRRNLTPSQLRTLAPPYMLLPQSLSQSLSRKQIPSQSMLV

SEQ ID NO: 3659 - skipped

SEQ ID NO: 3660 - protein, 50 aa, Homo sapiens
TSRILNLQVLKKILRSFMKLYHSLVMCLRLRTKLEKALSALFIWPQHSYK

SEQ ID NO: 3661 - protein, 50 aa, Homo sapiens
YKGRKERKTSVQGITTVILKRRTSLRRESFMKNFLAVTITGKKPRKSPGS

SEQ ID NO: 3662 - skipped

SEQ ID NO: 3663 - protein, 47 aa, Homo sapiens
KVICTFYPTDRTEIFTRKRSSHYSCCISHPKCEPVTEYCGWSEKCTK

SEQ ID NO: 3664 - protein, 46 aa, Homo sapiens
KRSLSLSVQANYTSSSTTLTRKSRYFFNRYISKQKLANIILELQFS

SEQ ID NO: 3665 - protein, 45 aa, Homo sapiens
PGLRPSQHLLLYITLRVVKWIPALATASAWPAPSAKTVWHPTLLI

SEQ ID NO: 3666 - protein, 43 aa, Homo sapiens
QRKVVKNPSQPVPLRNDGITNGNDSTRSCSISLKKSLEKMPLM

SEQ ID NO: 3667 - protein, 42 aa, Homo sapiens
GRRKRSEGGVKRKKENVCKRRKRNVGEKKRKGFDGRKRKGDG

SEQ ID NO: 3668 - protein, 42 aa, Homo sapiens
KIWTSSTRGGGRRRKTKWKYGTEVQKQTAPSVKESTAESRIS

SEQ ID NO: 3669 - protein, 42 aa, Homo sapiens
KSSFPATDFRPLPFCILVWPSTGGCFPVLFDPPANANNGLYF

SEQ ID NO: 3670 - protein, 39 aa, Homo sapiens
NGIWEVMPRTLEGCISVKDHRTSQNHSKCITECVRTALN

SEQ ID NO: 3671 - skipped

SEQ ID NO: 3672 - protein, 38 aa, Homo sapiens
NVNVCSPKILILKHQKMIRDFRRNLRKWLKSYKGKKQI

SEQ ID NO: 3673 - protein, 37 aa, Homo sapiens
KLESCGRCKGWTQSKDYIETKESENSIWEQDKKQPDQ

SEQ ID NO: 3674 - protein, 35 aa, Homo sapiens
NQESALTMKMMMMKKMGITFIPLSLPPRSVTALKS

SEQ ID NO: 3675 - protein, 34 aa, Homo sapiens
KKQTRRRKLLLLCKKNQILKKKGEKLKHCFKAWG

SEQ ID NO: 3676 - protein, 34 aa, Homo sapiens
KRRRRSKKSHRRGIETRRRKSKATGTYESEGKRS

SEQ ID NO: 3677 - protein, 32 aa, Homo sapiens
KIGSPRRRKIWKGWNQTICKYFSACYQNCFTQ

SEQ ID NO: 3678 - skipped

SEQ ID NO: 3679 - protein, 31 aa, Homo sapiens
NIRKLIWTKQRSFLSLFPKLRATEQMTNVGC

SEQ ID NO: 3680 - protein, 31 aa, Homo sapiens
WKKTQADCFFGLLKKIGLPQCGDSFLKRPLT

SEQ ID NO: 3681 - protein, 30 aa, Homo sapiens
KETFKKKTYTCAITTVKATETKAGKWSRWE

SEQ ID NO: 3682 - protein, 30 aa, Homo sapiens
SQTKNRFSQKCRRPITPGNCRNRFTFWKPV

SEQ ID NO: 3683 - protein, 29 aa, Homo sapiens
KLIPSYGFQASTLLHTGLAKHWWMFPCTF

SEQ ID NO: 3684 - protein, 28 aa, Homo sapiens
CKSWKQNSMKKNRKGNACKLRQLSCRLV

SEQ ID NO: 3685 - protein, 28 aa, Homo sapiens
TGMEILLWILLKMEIQIFKICLGEMQLC

SEQ ID NO: 3686 - protein, 27 aa, Homo sapiens
CTNLSVPMMLTILIWKRVFILLLSDKK

SEQ ID NO: 3687 - protein, 27 aa, Homo sapiens
GQAFGSFSADFSAPQVTRLRSLNHLLI

SEQ ID NO: 3688 - protein, 27 aa, Homo sapiens
KRRDHSCDHFPPQDHISFSGVKTDNPV

SEQ ID NO: 3689 - protein, 27 aa, Homo sapiens
KRSCIESLTKYQQQQQFYSWDSKSATL

SEQ ID NO: 3690 - protein, 27 aa, Homo sapiens
KTEKQEKQHGRSIGKRTRRYRSHPRED

SEQ ID NO: 3691 - protein, 27 aa, Homo sapiens
NSGRNRKEGNINPRECSFASDTYSDWH

SEQ ID NO: 3692 - protein, 26 aa, Homo sapiens
CLESGTDHILTEILSISCKKMNQMEL

SEQ ID NO: 3693 - protein, 26 aa, Homo sapiens
KSRTLGNCGPYCTSKAYNNQPTMETH

SEQ ID NO: 3694 - protein, 26 aa, Homo sapiens
NFCDKASAKVLGPRREIENWTTECKQ

SEQ ID NO: 3695 - protein, 25 aa, Homo sapiens
LQKKAPQKRIKLLRMLPALYLMACQ

SEQ ID NO: 3696 - skipped

SEQ ID NO: 3697 - protein, 25 aa, Homo sapiens
RNKKTKLWFSLINIHHRKNPLLPMR

SEQ ID NO: 3698 - protein, 25 aa, Homo sapiens
TIKISQIQNQSVNKNFHIHLKRTYQ

SEQ ID NO: 3699 - protein, 24 aa, Homo sapiens
KNLAIVEEEMFLVMGELNYVPLAL

SEQ ID NO: 3700 - protein, 24 aa, Homo sapiens
KTAGRGSRKAEAYSRRNGKGKKKT

SEQ ID NO: 3701 - protein, 24 aa, Homo sapiens
LCTICTSYVSPWIIFTEMEYFTEM

SEQ ID NO: 3702 - protein, 24 aa, Homo sapiens
NPRRKTWKMRKKYAQKPSQKNHLY

SEQ ID NO: 3703 - protein, 24 aa, Homo sapiens
NYCLFQRESAWWKQPGNSCSGDNF

SEQ ID NO: 3704 - protein, 23 aa, Homo sapiens
KCVRYIQGEGSCLSPPSSDGSLL

SEQ ID NO: 3705 - protein, 23 aa, Homo sapiens
KREETGRRRNDAASDMGKIHISS

SEQ ID NO: 3706 - protein, 23 aa, Homo sapiens
KSEEWTSQQSGLRTKGHSGQHPD

SEQ ID NO: 3707 - protein, 23 aa, Homo sapiens
KTGGIETSAGCKEKETRNFRKAH

SEQ ID NO: 3708 - protein, 23 aa, Homo sapiens
NVLCKQQNGLPAPEHVGWEYLTG

SEQ ID NO: 3709 - protein, 23 aa, Homo sapiens
NYDGNSAARDSKCSEVSSIHVIL

SEQ ID NO: 3710 - protein, 22 aa, Homo sapiens
KRESFLWNHGYPTSTNRRPNDQ

SEQ ID NO: 3711 - protein, 22 aa, Homo sapiens
KRNSRRATPTSKGSLRRKYLRV

SEQ ID NO: 3712 - protein, 22 aa, Homo sapiens
NERKVKRERIYQCSRILDKPNQ

SEQ ID NO: 3713 - protein, 22 aa, Homo sapiens
NMEHRLTMDSALSLTKREGPET

SEQ ID NO: 3714 - skipped

SEQ ID NO: 3715 - protein, 21 aa, Homo sapiens
KMSCASNKMDSLLQNMWDGNI

SEQ ID NO: 3716 - protein, 21 aa, Homo sapiens
KNKWNAMVVLNKSLNRVHLLG

SEQ ID NO: 3717 - protein, 21 aa, Homo sapiens
LLFIPTGISLVETAREQLFRG

SEQ ID NO: 3718 - protein, 21 aa, Homo sapiens
LLQPCLKALSVPLWKMPSRAS

SEQ ID NO: 3719 - protein, 21 aa, Homo sapiens
NPGEICPLHRANHCTQIEHHY

SEQ ID NO: 3720 - protein, 20 aa, Homo sapiens
FREKRNYVKKKSKLKKKEKK

SEQ ID NO: 3721 - protein, 20 aa, Homo sapiens
KILLFQSIEHTCLKCFKRGC

SEQ ID NO: 3722 - protein, 20 aa, Homo sapiens
KLLKKSSQLRRSWRNVSRIS

SEQ ID NO: 3723 - protein, 20 aa, Homo sapiens
KRGIPEGPPRPPRAACGGNI

SEQ ID NO: 3724 - protein, 20 aa, Homo sapiens
KRWSEKIAHVWHRDSGVSTA

SEQ ID NO: 3725 - protein, 20 aa, Homo sapiens
KSATTTTVILEIIIMDRVIP

SEQ ID NO: 3726 - protein, 20 aa, Homo sapiens
KTRLFARGTVLLERRRYYWC

SEQ ID NO: 3727 - protein, 20 aa, Homo sapiens
KVKHLAVCANSFQPTFQLLK

SEQ ID NO: 3728 - protein, 19 aa, Homo sapiens
KGELSLEPWIPYLHQQKTQ

SEQ ID NO: 3729 - protein, 19 aa, Homo sapiens
KIRLSEQELSEFSLSSSEY

SEQ ID NO: 3730 - protein, 19 aa, Homo sapiens
KPQQSESICHGNWKEDSSP

SEQ ID NO: 3731 - protein, 19 aa, Homo sapiens
KRNRPEEGSCCSCARRIRS

SEQ ID NO: 3732 - protein, 19 aa, Homo sapiens
LTDFFVLWKASGTIQFNCK

SEQ ID NO: 3733 - protein, 18 aa, Homo sapiens
KKAKNGCKQDNSLYRGLL

SEQ ID NO: 3734 - protein, 18 aa, Homo sapiens
KPYDLCPSPETRSSSEET

SEQ ID NO: 3735 - protein, 18 aa, Homo sapiens
KRRAQRRQSDSSYSVIEG

SEQ ID NO: 3736 - protein, 18 aa, Homo sapiens
NIPQPLEKNRFCSSSSAA

SEQ ID NO: 3737 - protein, 18 aa, Homo sapiens
NNSDHMWRLPFSCTLKRW

SEQ ID NO: 3738 - protein, 18 aa, Homo sapiens
NQACVPANTFCSTSRCEL

SEQ ID NO: 3739 - protein, 17 aa, Homo sapiens
ILFHVRNIVYGIQVMLC

SEQ ID NO: 3740 - protein, 17 aa, Homo sapiens
KTAENKEHSVKQDIERT

SEQ ID NO: 3741 - protein, 17 aa, Homo sapiens
KTEEEREQGEQGETNEF

SEQ ID NO: 3742 - protein, 17 aa, Homo sapiens
NILNSLPSSMEIAVLQE

SEQ ID NO: 3743 - protein, 16 aa, Homo sapiens
FQKNGALRIFLLLSKC

SEQ ID NO: 3744 - protein, 16 aa, Homo sapiens
IQNLGKLWTLLYLKSL

SEQ ID NO: 3745 - protein, 16 aa, Homo sapiens
KRRNRKKKKRCSKRHG

SEQ ID NO: 3746 - protein, 16 aa, Homo sapiens
KVKHLAVFQPTFQLLK

SEQ ID NO: 3747 - protein, 16 aa, Homo sapiens
LGQIIMKKMRRPVCYK

SEQ ID NO: 3748 - protein, 16 aa, Homo sapiens
NGRLLTLLNYSEGSLE

SEQ ID NO: 3749 - protein, 16 aa, Homo sapiens
NRKTRKAAREKHRKTD

SEQ ID NO: 3750 - protein, 16 aa, Homo sapiens
NSRKKLLEDMKQNGFT

SEQ ID NO: 3751 - protein, 16 aa, Homo sapiens
SNGMEACGTHPTPRLS

SEQ ID NO: 3752 - protein, 15 aa, Homo sapiens
KATEWRHAELTQHLA

SEQ ID NO: 3753 - protein, 15 aa, Homo sapiens
KENGIQLEQLGRNTL

SEQ ID NO: 3754 - protein, 15 aa, Homo sapiens
KIQGDFEALRCEGCD

SEQ ID NO: 3755 - protein, 15 aa, Homo sapiens
LMLLRLNLRKMCGPF

SEQ ID NO: 3756 - protein, 15 aa, Homo sapiens
LMNILKRVPKSLGLT

SEQ ID NO: 3757 - protein, 15 aa, Homo sapiens
LTETVYSTTQQIHSS

SEQ ID NO: 3758 - protein, 15 aa, Homo sapiens
MKALISQEMFSQALL

SEQ ID NO: 3759 - protein, 15 aa, Homo sapiens
NRKPKTDFRKNAGGQ

SEQ ID NO: 3760 - protein, 14 aa, Homo sapiens
KAQLHFAAESIIII

SEQ ID NO: 3761 - protein, 14 aa, Homo sapiens
KRIQLYLYEAMCRK

SEQ ID NO: 3762 - protein, 14 aa, Homo sapiens
KRRKWQIRHVLKNL

SEQ ID NO: 3763 - protein, 14 aa, Homo sapiens
KSHQQVHGDFRKYI

SEQ ID NO: 3764 - protein, 14 aa, Homo sapiens
KSPDKENKAVFRGF

SEQ ID NO: 3765 - protein, 14 aa, Homo sapiens
NRRKEGPNSNREEY

SEQ ID NO: 3766 - protein, 14 aa, Homo sapiens
NRRRKRTRRTRRNK

SEQ ID NO: 3767 - protein, 14 aa, Homo sapiens
NSERREIMSKRKAN

SEQ ID NO: 3768 - protein, 14 aa, Homo sapiens
NTKEEKKEKQVFRA

SEQ ID NO: 3769 - protein, 14 aa, Homo sapiens
RKMQSLNHPSRLTN

SEQ ID NO: 3770 - skipped

SEQ ID NO: 3771 - protein, 13 aa, Homo sapiens
IASTFYLDGNVSS

SEQ ID NO: 3772 - protein, 13 aa, Homo sapiens
KKKKKQEKPQKRN

SEQ ID NO: 3773 - protein, 13 aa, Homo sapiens
KRQINRRKLQRKK

SEQ ID NO: 3774 - protein, 13 aa, Homo sapiens
KSQKDKSPDELQG

SEQ ID NO: 3775 - protein, 13 aa, Homo sapiens
KSTVTYGCQAKPL

SEQ ID NO: 3776 - protein, 13 aa, Homo sapiens
NGKRPKQIASLGC

SEQ ID NO: 3777 - protein, 13 aa, Homo sapiens
NSRAFSCNKEKGI

SEQ ID NO: 3778 - protein, 13 aa, Homo sapiens
RKSGVMKCWDLCP

SEQ ID NO: 3779 - protein, 12 aa, Homo sapiens
GEKLKHCFKAWG

SEQ ID NO: 3780 - protein, 12 aa, Homo sapiens
KCPCRTLQTSSY

SEQ ID NO: 3781 - protein, 12 aa, Homo sapiens
KITDIATHPWLS

SEQ ID NO: 3782 - protein, 12 aa, Homo sapiens
KMEVPSCCLDHC

SEQ ID NO: 3783 - protein, 12 aa, Homo sapiens
KRYSRKQATECL

SEQ ID NO: 3784 - protein, 12 aa, Homo sapiens
KSKSRFASRSKA

SEQ ID NO: 3785 - protein, 12 aa, Homo sapiens
LLRQGKCQSAWS

SEQ ID NO: 3786 - protein, 12 aa, Homo sapiens
NDKSLCHCDRWT

SEQ ID NO: 3787 - protein, 12 aa, Homo sapiens
NKCSTNSTIRTA

SEQ ID NO: 3788 - protein, 11 aa, Homo sapiens
KCVHHWRYQPA

SEQ ID NO: 3789 - protein, 11 aa, Homo sapiens
KGTRKQNSGSL

SEQ ID NO: 3790 - protein, 11 aa, Homo sapiens
KMLNQKCLAPF

SEQ ID NO: 3791 - protein, 11 aa, Homo sapiens
KPGTSLQCYLN

SEQ ID NO: 3792 - protein, 11 aa, Homo sapiens
KQGWKYSFGSC

SEQ ID NO: 3793 - protein, 11 aa, Homo sapiens
KREGNGRSDMY

SEQ ID NO: 3794 - protein, 11 aa, Homo sapiens
NKIICKGHRIT

SEQ ID NO: 3795 - protein, 11 aa, Homo sapiens
NKRIFKDNGTS

SEQ ID NO: 3796 - protein, 11 aa, Homo sapiens
NQYQRSLQCWP

SEQ ID NO: 3797 - protein, 11 aa, Homo sapiens
NWISKKLNLTM

SEQ ID NO: 3798 - protein, 10 aa, Homo sapiens
ILAMTLTLNG

SEQ ID NO: 3799 - protein, 10 aa, Homo sapiens
KDTERGAKAI

SEQ ID NO: 3800 - protein, 10 aa, Homo sapiens
KEGGRGAKAA

SEQ ID NO: 3801 - protein, 10 aa, Homo sapiens
KRTNGTRWLF

SEQ ID NO: 3802 - protein, 10 aa, Homo sapiens
KSLVPHCNVT

SEQ ID NO: 3803 - protein, 10 aa, Homo sapiens
NFRRRHLRRE

SEQ ID NO: 3804 - protein, 10 aa, Homo sapiens
NKEEIAVHYL

SEQ ID NO: 3805 - protein, 10 aa, Homo sapiens
NKVRQNFKRN

SEQ ID NO: 3806 - protein, 10 aa, Homo sapiens
SGRNLPTAPC

SEQ ID NO: 3807 - protein, 10 aa, Homo sapiens
VLTKQKVLYK

SEQ ID NO: 3808 - skipped

SEQ ID NO: 3809 - protein, 9 aa, Homo sapiens
KIPEEKLGR

SEQ ID NO: 3810 - protein, 9 aa, Homo sapiens
KKPLTFSPS

SEQ ID NO: 3811 - protein, 9 aa, Homo sapiens
KMEITMMIS

SEQ ID NO: 3812 - protein, 9 aa, Homo sapiens
KRWRCPVVV

SEQ ID NO: 3813 - protein, 9 aa, Homo sapiens
KTYCYHKYK

SEQ ID NO: 3814 - protein, 9 aa, Homo sapiens
NARVGSKTP

SEQ ID NO: 3815 - protein, 9 aa, Homo sapiens
NEAFSHGAI

SEQ ID NO: 3816 - protein, 9 aa, Homo sapiens
NSRKRKQKG

SEQ ID NO: 3817 - protein, 9 aa, Homo sapiens
NYALYVPVM

SEQ ID NO: 3818 - protein, 9 aa, Homo sapiens
VPSASPWGL

SEQ ID NO: 3819 - protein, 8 aa, Homo sapiens
GHLHLLPH

SEQ ID NO: 3820 - protein, 8 aa, Homo sapiens
KCPPAALV

SEQ ID NO: 3821 - skipped

SEQ ID NO: 3822 - protein, 8 aa, Homo sapiens
KKSTEKTK

SEQ ID NO: 3823 - protein, 8 aa, Homo sapiens
KSCSMSEI

SEQ ID NO: 3824 - protein, 8 aa, Homo sapiens
KSLLLLRR

SEQ ID NO: 3825 - protein, 8 aa, Homo sapiens
KTSENTPF

SEQ ID NO: 3826 - protein, 8 aa, Homo sapiens
KTTKKAET

SEQ ID NO: 3827 - protein, 8 aa, Homo sapiens
KVQQKASN

SEQ ID NO: 3828 - protein, 8 aa, Homo sapiens
KVRSLHTR

SEQ ID NO: 3829 - protein, 8 aa, Homo sapiens
NAQICQFQ

SEQ ID NO: 3830 - protein, 8 aa, Homo sapiens
NMKPSLLL

SEQ ID NO: 3831 - protein, 8 aa, Homo sapiens
NTDWNKTL

SEQ ID NO: 3832 - protein, 39 aa, Homo sapiens
LRSPQTSPLRLRTRWVWSGPQAGVSAARRPRWRCSTCRR

SEQ ID NO: 3833 - protein, 50 aa, Homo sapiens
PPYPPSWPLAEGAGLLLLCKRHCGFAFQHRNREKRFNVQMLFPIIHGCKS

SEQ ID NO: 3834 - protein, 28 aa, Homo sapiens
PVPPELAPGRRSWFVVIMQAALWVCVSA

SEQ ID NO: 3835 - protein, 100 aa, Homo sapiens
LGVAGRLLGTSSGSHHLQGTPVPKPGPSPASPASRPPSWLGFGPAPAPTPACPSPKEEEPTWTAAHSGGAVRGGPGCQPSGWRGGPSREGAGRAGRPGGP

SEQ ID NO: 3836 - protein, 99 aa, Homo sapiens
PAASQGKQGRDVRRALTGSCGLAAAEPEQARPGQAGPEGPDWGEAAAEAAGRRRSSPRCFLQKSRPHSSGSAWRRCVTSGSGSTHGRSGRDRLPARGPV

SEQ ID NO: 3837 - protein, 99 aa, Homo sapiens
RSCRRRPSCHRCTAWCCQSGTCSGRSRPSWPSCPIPRRDPRPGHRSASPGPKPSLRPSSWQECDEAPSLRCLGLWCSPRRSPDHRGGNPRPAARLSMGS

SEQ ID NO: 3838 - protein, 99 aa, Homo sapiens
SCSPRSSAMPPVPLPAPPKSASTSLSQPPAMGHPSHLHRHPRLHHPCPCSSRPTSAAMAWSPRPPAPACDPRRAWIRQAPCRNCSGLWSRCPRRLGILA

SEQ ID NO: 3839 - protein, 98 aa, Homo sapiens
CSRCSRHLAGLALALWGNQSSSWPITLRWTSLRSTCTTTRWTSSRISVPVESTGKWWNTWSSISSLRSLVIASLCMMERRTFTLSQHCPLATNGSTLR

SEQ ID NO: 3840 - protein, 98 aa, Homo sapiens
LPAGFSPPRPPAPSHPRPSCRRCPPEACPRTLPTSKAPPSLTRCGSGTRTSCGCPSRRPGPSSARGGVCPATATRGASSSAPSACGRARCSVRSARAR

SEQ ID NO: 3841 - skipped

SEQ ID NO: 3842 - protein, 96 aa, Homo sapiens
PARQARAQDRWRTQRPGPASSPGSRSPSHVRHLHHGWASVPGLPKVAMAPGTPGIRGPHAPPTWLPARPSRLPGSAAAPTLPRALARLPPAVGGCV

SEQ ID NO: 3843 - protein, 96 aa, Homo sapiens
TPAPGAGGGGGSPAGGAPLCPHHRPLQCRDWEDRLLHCHQHLLPAAAAGGCGGHPEDHVPAPSGQGRHDPDMRAVPVCAPRHEPLRKAAVPPVPRM

SEQ ID NO: 3844 - protein, 94 aa, Homo sapiens
CLVKKTVHLPIFPNSLAMVIRMSGCSSSSELTQTRGPRRPPGHQCYLSPHETWKVPRMQPGSRMQRLLKVLRTPQSLLKAQKNLYLHQHQQSSN

SEQ ID NO: 3845 - protein, 94 aa, Homo sapiens
GPLGSRQLPAACSRPSPSPTARTNPGRHHQSSGRQSRATHRGRTDWARPSPRGDPCSGPPRGAQLSTVLNLPSHTPTGRPRPRVTSSASSSGRD

SEQ ID NO: 3846 - protein, 94 aa, Homo sapiens
IAPSCLWQRGKTSSPFPRRPSTTSCSASCSSSASPSAPASSALASHCRASVTAPGTATSPTAPPSCCPATTTGLQPGLRTLPMDCCRLRSSRPP

SEQ ID NO: 3847 - skipped

SEQ ID NO: 3848 - protein, 94 aa, Homo sapiens
RAAAAAAGGSPCRHLRAAEWGPYFLPRPPPPLPHPPHRPPPRPHRRAPGRWWCQQRCAAFASMCSTVTCMDTSSPGPPDSPTSPMPLKIAVFPQ

SEQ ID NO: 3849 - protein, 94 aa, Homo sapiens
RLCPQSRGRGLHALPLQWLLDGRHPLRFQLLPQPHLQYLYRAGLHHPRDGPGAAGCLHGGTPENYHPPAPRLWGEWNWRQDPWLCRANLQRPCH

SEQ ID NO: 3850 - protein, 94 aa, Homo sapiens
SPTIPCPTDSLLCSHLGETALPTRRPPAPTPCTDTESASGQAVRPCVKTWASLSNTSTQSTPWMTGVQPSAGYRCRWCSSWRSSSPRRASGCRP

SEQ ID NO: 3851 - protein, 94 aa, Homo sapiens
SRSPKSMSPPGRTQLPPSQLPQPHRHRKTCSRRATPLSSLAAAPGARAGARHPPPTRRQRSLCSSQPSQPRPRSCLGTPLAGLPACPSPCPPVR

SEQ ID NO: 3852 - protein, 94 aa, Homo sapiens
VGPLGRPSSRFHPRRRQPTACRMLYMHRGRRAEGHTHGRPTTCPCQWQPSPCPPPQSRERRPGCHPGKKQSWQRARPSRQQAPWAVCSPCWSRR

SEQ ID NO: 3853 - protein, 93 aa, Homo sapiens
CSQRGQLGPFMNCPARNRRNTRREGWRITAGKPTRRSTSPRWKSVSPPSASGKTPSTWTPCVPSGTGVTSSKGSTRCGKRSSRRPWRWATRLR

SEQ ID NO: 3854 - protein, 93 aa, Homo sapiens
RGPGRAGQAGLGAGPQTSKYPTGGPVPIRRREDLGDGQRLSPTPTAGRRVRAGLPQLPPAMLPGGPVAGSEWRNQGQGAPAVPSIDPKEEEAL

SEQ ID NO: 3855 - skipped

SEQ ID NO: 3856 - protein, 93 aa, Homo sapiens
TSSPRTMSWLCCLGQIMASAVEASQPPTWPSMPRRTPVGPVSSPARQEGVRVCSGCVTCGETAPMAAMTTAAAPCSHPQSWPVSLSRWRCASV

SEQ ID NO: 3857 - protein, 92 aa, Homo sapiens
ARVPVPDVTAAAAAAAAAAESGAAGRPGPRRARRECRPRAEPPMRGLPRLRVHAARPAGPAEDSLQPGRADGDPTAAGRAPCPVCLLASGAL

SEQ ID NO: 3858 - skipped

SEQ ID NO: 3859 - protein, 92 aa, Homo sapiens
SCPRGSAPRDHPPRATPAPRAAAARRKPAPVPSLLRRRPLPSPAVAPGHVQAVGAPAAAQDHQAHAAASVPQPRPGAPHPQHHPPAAAPGAL

SEQ ID NO: 3860 - skipped

SEQ ID NO: 3861 - protein, 91 aa, Homo sapiens
PAATAAPALSAGNFPEAAGPGGCVPGPDAGRLDGPLLPEPGPAAGGCPQDPRLSLPPCLPAGKWLYHPALHALLHGDQRGQDRVHSCLEKE

SEQ ID NO: 3862 - protein, 91 aa, Homo sapiens
PGMGRSPPLPPWWAAWTPTPIATAPPCACSSTGRRSYKTWPPWSASSSSSSTSPRASSPPASSSTATVSLKASSSRFSTTSCWPSVRPVSS

SEQ ID NO: 3863 - protein, 91 aa, Homo sapiens
PGTEDSDQVPGWSSIPVGLEVPGGPSQASAGQGRHGDREAGAGAECASGSWGWSRKHWRNHQQHCALGEQHSWELLLCPVQEPASQEDQAV

SEQ ID NO: 3864 - protein, 91 aa, Homo sapiens
RSQPGIHPAESCGHRLLRGDVLPAGACVRGNSRSIHRVSHSSAQCCCPCSRGTSHGLKVPLLLWCQRFGHGFLLHAGGNHYSCHNSGICVG

SEQ ID NO: 3865 - skipped

SEQ ID NO: 3866 - protein, 90 aa, Homo sapiens
PDAHQNPTRLSPGPWGTSWSSPSYGQGEAHPAAAAADRAPHVTPLPASVTDAPRLCLRAAPARGGRGGAGCPGACAPTRADGCAHTVPAP

SEQ ID NO: 3867 - protein, 90 aa, Homo sapiens
PPLLLPLHCLHPHHQAPNSRSEQHERLCQLPISRQRAAALHHEAHRGRPGGGRPVLHALPGVPGRACAHPQRAAHQQAAARVRHHGPADR

SEQ ID NO: 3868 - skipped

SEQ ID NO: 3869 - protein, 90 aa, Homo sapiens
RAPLRRGKRPLWESRRGWAQRRASHSTSGRPLRLPTGRGRGRRRSARRTQLPAPCRRGRHRDSLGAPCTGGRARHSCPLSDGRKMAHSHR

SEQ ID NO: 3870 - protein, 89 aa, Homo sapiens
APRGPPVLGGGNVVAGGLHPRRAFSSLRGPGLPGAGGPDAECDSHEPRGHANGHSHSHGARGSGGCPGDRLQRDPRGRETGGPGELDGL

SEQ ID NO: 3871-3872 - skipped (2 entries)

SEQ ID NO: 3873 - protein, 89 aa, Homo sapiens
PGPANPSAAPHTLCSDHSVPPAVRPRPGPLAGPCRAAFRAQAPRCCLCQGGLPTSGSPREARALSRGSPGASRESPSSHGAPQARQQSQ

SEQ ID NO: 3874 - protein, 89 aa, Homo sapiens
RAGLLCSLEPGRGRQDVRYVHPRALPASPWRGPRGRPQRAQQAAPRRGRRGVRARSGADPQDEGAGEPQERRRERLGVEPRRPRQGRAR

SEQ ID NO: 3875 - protein, 89 aa, Homo sapiens
RTAAATAAAAAAAAAAARGSLEEQRAARPRTPPRAKPPSPATPRAPMDTWRPSSARSPDRKSSSPQARAATRWFTAVTCVARASVCSAC

SEQ ID NO: 3876 - protein, 88 aa, Homo sapiens
APQAPQAHVATLGFQVPRERASGASPAHLDLRDPPASATRGARALPAPQAPQGPLHFLALTGRLSAFPALRAPLGPLGPLEPWAPPQG

SEQ ID NO: 3877 - protein, 88 aa, Homo sapiens
GGFRQWWCTCRMSGPSCLLWRSGRPCASRKLQRQLPQPRRHKGKRSLLNRHLMPWSKQQTLLDGTQKLQRPPHSRKRTLISQRPLHPP

SEQ ID NO: 3878 - protein, 88 aa, Homo sapiens
QHGCTCHHLHPLQPCSAGRMEAESKRSCREHHANQGKSEGETPAPGNPWVLGSHHRAEWDPRLSWTQLPAGGIPGQEEAHLYPQERSD

SEQ ID NO: 3879 - skipped

SEQ ID NO: 3880 - protein, 87 aa, Homo sapiens
GCGGRGGGGGKQRGWGSRGSGRRLSSLLVVRLVFVFVIVLSLFRAGPAPGGPGLRRGAAGLGRHRHQPAPVPGRVWGERRGRRQRRG

SEQ ID NO: 3881 - protein, 87 aa, Homo sapiens
HAGGHRQRWGGTTAVLHGAPAAPGCLPRAGGAEPVADPEQPGDGEDPGGAEPHPETHPDPHGQGGQPAEAVGHHNDDVHHQGGGHSS

SEQ ID NO: 3882 - protein, 87 aa, Homo sapiens
PGLRRRRRGDRPVATSELRSGDPTFYPGRRHLFLTLLIVRRLVLIAGLPEDGGVSRDVLLLLRCALLSPVWIPAAPDPPIHQRALCP

SEQ ID NO: 3883 - skipped

SEQ ID NO: 3884 - protein, 86 aa, Homo sapiens
AVGRRCWPRRWPRRLRCPSWRWPAQSSWRSLEASALPVCGASLRKPEPGPPASSTSMRSTRWARSAPPPCPASPTRRRSRRSTSFW

SEQ ID NO: 3885 - protein, 86 aa, Homo sapiens
PAQCPQPQPYPHSSTPSPCLCLCPSGASRRRGQRRGHQMRRMGRPLRPTWTASRRACARWCCERPRTPRSSGTCHGRGLTPATSRS

SEQ ID NO: 3886 - skipped

SEQ ID NO: 3887 - protein, 86 aa, Homo sapiens
SRSPKSMSPPGRTQLPPSQLPQPHRHRKTCSRRATPLSSLAAAPGARAGARHPPPTRRPSQPRPRSCLGTPLAGLPACPSPCPPVR

SEQ ID NO: 3888 - protein, 86 aa, Homo sapiens
SSPTPRTCPTTWPPSRNPSATPCRKLCHTLAALTSPTPPYNKVCTYHTPAASQGLHYITVGLLLLLLPSLPGSRHRPLPAAIHTAT

SEQ ID NO: 3889 - protein, 85 aa, Homo sapiens
PGLSGQRLQPQRRPRPRPHTGARPQRHQCHRPREPSPLLPAAGLRAGHAAALHPATGHCPPGRPQAPRRLRILGPEVGKVKGEGC

SEQ ID NO: 3890 - protein, 85 aa, Homo sapiens
PGPLIAGSQNGGVSQDVEPQGAPRLGPAVPRALHSLLQGAAAPPPNTGIPLESGREGGFGGVLGPRGLLHPVPLPPNPGPAAGLI

SEQ ID NO: 3891 - protein, 85 aa, Homo sapiens
RPPARRRRRPRRRAAPRTSTTSSGPACGRRARGPGRILRALWGAATPVARGPAEKELKVVDHRLEMCLGLPLLPLQGARAPPPGT

SEQ ID NO: 3892 - protein, 85 aa, Homo sapiens
SAHPWGPVQRVRAADPEYSGLERVSDIWGAHLVRDQRVRGLLLRWGAVLCSQDAAEVSVSKKVRSLQDCGAHALHRAAGEDKFPL

SEQ ID NO: 3893 - protein, 85 aa, Homo sapiens
SPRCHLGPGHQAGPGLHRPPSPWCHLGPGQQARLGLHRPSSPQCHLGLRLCIRLSFYSGAQRHLCQGYHNPSQQEHSILNSQPPL

SEQ ID NO: 3894 - protein, 84 aa, Homo sapiens
GGAASASPTQPREEAPSPPTSSPPPSSPVTVLGQGDSDLPGEIPGTTANQSPLLGMSYGAAAREDHQRPCGVVQNPNSLWLATP

SEQ ID NO: 3895 - protein, 84 aa, Homo sapiens
GRTQLPPSQLPQPHRHRKTCSRRATPLSSLAAAPGARAGARHPPPTRRQRSLCSSQPSQPRPRSCLGTPLAGLPACPSPCPPVR

SEQ ID NO: 3896 - protein, 84 aa, Homo sapiens
GRTSGRSLSCCPRPRCRPAVASRSTAPSPRAGSRRCCLRTSCGAARPRRTRSAWGDWVASPPTRSSSRTACGAASPPARSWSAP

SEQ ID NO: 3897 - protein, 84 aa, Homo sapiens
HLLYHHPCQAPVSSCPHHLHHSRAWDARPHPHPCCLVWAGALLHPHLHYCPAPAAPPWREAWRRSSWPRWTMAWAQHGSPAIGG

SEQ ID NO: 3898 - protein, 84 aa, Homo sapiens
HRSGHSSLRHPPTLHPEDWAPPPAQLRERGPVSCSVVEPPCRIIRAGTRRARRRIQRRSLGRLWSAAGSSVSGQTTFMGGRIVG

SEQ ID NO: 3899 - skipped

SEQ ID NO: 3900 - protein, 84 aa, Homo sapiens
SAHPWGPVQRVRAADPEYSGLERVSDIWGAHLVRDQRVRGLLLRWGAVLCSQDAEVSVSKKVRSLQDCGAHALHRAAGEDKFPL

SEQ ID NO: 3901 - protein, 84 aa, Homo sapiens
SHFLRSQWKFREQKELPLSLSGRMLPQPLEQQQKRPCPEVHLLLLRGAPGMNRMELQLRQNLGQLQSPQNGSLLSSRTFRASGR

SEQ ID NO: 3902 - protein, 83 aa, Homo sapiens
GLPLQSTPLRRLPLQLLLLPPPPASLAQRPRPQPQEPPHQPLKWKGLQLLSQWAQRRCLRMESPMQQSSAGAACRSWSLLLPT

SEQ ID NO: 3903 - protein, 83 aa, Homo sapiens
GRGQQRRRWEAPRGGSGHPGGRRCQRAQQQPPGRRAGRTCRPRSRGRELRGRLRHADAGGPRPAAVGGRAPSRLCLGCTAAPA

SEQ ID NO: 3904 - protein, 83 aa, Homo sapiens
LTVLQNHPSLPRPIPAPPTLCPQTRWPHLRGHQGILAASHILETALAAIFQGGAALLVLLALPCRDPQTRQPQIQFLSPAQEL

SEQ ID NO: 3905 - protein, 83 aa, Homo sapiens
NPGCTLWPHQGPCQRPQTGSSSLPTQWGKSHSIPKFKIRKIPDCFSRSRTFLDRVYSPFRSDPAKIGRGTTRFYFKEILPPDD

SEQ ID NO: 3906 - protein, 83 aa, Homo sapiens
PGGRSSHQASSPSPTATAKPAAGERRPSAAWQQPPGQEQEPGTPRRQGGREACVLPSLRSRGPEAAWGPPLLDFRPALPRAPP

SEQ ID NO: 3907-3908 - skipped (2 entries)

SEQ ID NO: 3909 - protein, 82 aa, Homo sapiens
PLPPHPLPARASQGLPFSRRWAGSRGCLPVPGGDPIPPRGPRGGSGRAAGLPPCAASVPHTPLLPQQRQPGPAGRAADLQAV

SEQ ID NO: 3910 - protein, 82 aa, Homo sapiens
PPGPCFPPGPLPAHLTRPSPPTPSPRTHAHPHAGTPAPGAHQSLPRGTTRCPHGQPVLSHRPAAPHRSETAAAPDAAGTTGG

SEQ ID NO: 3911 - protein, 82 aa, Homo sapiens
QPEEPAQYGTALTHPHARDLLHSLLPAQVQEQPLPGGQGSSHHRGLWHPHLHPGDGPGGLLHHRHLHAEADSAYRALSDLSR

SEQ ID NO: 3912 - skipped

SEQ ID NO: 3913 - protein, 82 aa, Homo sapiens
SHAAAQWASPVHGAVAARPADPGPEEARHPGRLTPGRPPAWGPASQPPPRGAACRRGPAPGAAAPAREATTPAAIRAWPCWG

SEQ ID NO: 3914 - skipped

SEQ ID NO: 3915 - protein, 81 aa, Homo sapiens
AMEAPRGTCSPAPRACLWASLVKGTLSPKPSRMLGSCCTATVGPWMAPPTPPSVRTSSAWTHPQPRSGWRTAVCTHWRKPC

SEQ ID NO: 3916 - protein, 81 aa, Homo sapiens
GGGTIQPQATGLLKPKISQNMIPQMARVTGVSGLSAASPAGTATRNGPGLVATRALQQNRGPVTVQTAQELKTLLGQLPPK

SEQ ID NO: 3917 - protein, 81 aa, Homo sapiens
HGRRGLLHHLSPGHGPHHPPVTPQTRSPAQPQDRWGHGRPWGAVCPLRPGPQPAGGQNEPPRPASALAGEPALGARGPHVL

SEQ ID NO: 3918 - protein, 81 aa, Homo sapiens
PVHRGARGPGPAHGLRRLQRAVRALQPAQHRQDRRRAEPLLQQAAVRPAGRAPAHQPGQGLHQLLRHERGQCGLEQLHLRL

SEQ ID NO: 3919 - protein, 80 aa, Homo sapiens
AESEPHRPWDASSSSTPPSKPTVMKVTSSIQSGWRRVQQGGWASACAGAQSMAWASSSAKWRKAAVQSGLACAWGTRSRR

SEQ ID NO: 3920-3922 - skipped (3 entries)

SEQ ID NO: 3923 - protein, 80 aa, Homo sapiens
QRNDAGPQRGCDGQRDWGQDEDSQEQEQERTHRDRDEQIHGERHAGGEDQVRRGGRGGGSLPQPQEAGSRRAPPSCRQDF

SEQ ID NO: 3924 - protein, 80 aa, Homo sapiens
SLMTSTFTSSHFKWILLLTILLRGARPVCHLQARGPAPALPSQFSSTPGSSSQTVARHQLFVVMMKMLHHCQPNLLIFIH

SEQ ID NO: 3925 - protein, 79 aa, Homo sapiens
ASRRPSWPAAPPAPPGPHSAPRPPLPVAAASAPARPPPPDATRPGHRPAGDCGCRWTRFPAPVPPRPQTSQPALLRARR

SEQ ID NO: 3926 - protein, 79 aa, Homo sapiens
CSPPSPQNRSRTNGSVTTSATEAWCRTTLPASQRSSACTRSTLMSCTEASRDPAKMRRRSWQRRRLPSVIPTRTARWPR

SEQ ID NO: 3927 - protein, 79 aa, Homo sapiens
GSRAWTRGAARLPSPSSPTSRWTAGCRRRTRSGAVARRAARPSRAPAAPAARGLGSACSPLPSGAAASRSPRRARRLRG

SEQ ID NO: 3928 - protein, 79 aa, Homo sapiens
GWLRPPCPPGPCPALMPRPPPPPRLPPLPPTSIGTRVTRAWPACGSKPNSTPPSATPLCTGRPRQPTLVRASTPWKGPY

SEQ ID NO: 3929 - protein, 79 aa, Homo sapiens
PGVRRTSRCWQSKSWALSNGSTSGMVTDSSTGMTPRKMSLFTRQLLKETTPGSFCAALEMGRLWNLMSWKERRAQKPLM

SEQ ID NO: 3930 - protein, 79 aa, Homo sapiens
PRPLGPSAGLALGPALWAALRGACGPSSPGPSPTSYPSPCWDPRPHPDPEAGPRLRPLLPTQAPTAGGQPRLHRPGCRR

SEQ ID NO: 3931 - protein, 79 aa, Homo sapiens
RAGRPSSTTASRAGRPSPRPAPCRSMSARTPARSRSAAPSAAGPSPLRATSRCTWGHTCGITPPRDAAAACLWRTPWLS

SEQ ID NO: 3932 - protein, 79 aa, Homo sapiens
RTTMRPSLASTILQASSTMRPKASWRRTETPCMGTLSSWSTPPGTSSSSRSSRPMSPWAPRPGSARPHLAASSSGHWSC

SEQ ID NO: 3933 - protein, 79 aa, Homo sapiens
SPPTWRPWGSLCLCRPSTLGCPSSGSTTTWTCVGTSPPWAASPTPPLRLAQPFPRRCPCTTCPTIRCTRSCPLVCHILT

SEQ ID NO: 3934 - protein, 78 aa, Homo sapiens
AAGPAAAARGAPGRPDGGPRSADAPAPHRPQRGERRQALRSLQRGRAAPEGQQQHHGVCSRAHLRARGRDRGQARLQD

SEQ ID NO: 3935 - protein, 78 aa, Homo sapiens
ALWMARRGHTRWPAAPRATPSPWSPSPRAVMGALPSTAAPRSRAGRQRSGPATWRCCGGHSPCPLVAPARTGCPRVNC

SEQ ID NO: 3936 - protein, 78 aa, Homo sapiens
CMSSSGCALDSCFPSSSSSASTLPELTLITWDESGCRRGPLSRLRVSGWKTRAGTSAACSSWTSTSLKTILLTAPGCI

SEQ ID NO: 3937 - skipped

SEQ ID NO: 3938 - protein, 78 aa, Homo sapiens
LSCALRVLQAWLEPLAGDHHLQQVPGKIHLHHAARCHPLRIPGQWESLRVEEEHLNCSQHHRGQALDRPVRGHRDCEP

SEQ ID NO: 3939 - protein, 78 aa, Homo sapiens
PAPTSSSSPSGGGRRAGEHLPHLSGGDPECQDIGEVPAFILRGLHHPGSAGEKGLPHVRPLLWAAGGQPAPEWADAGL

SEQ ID NO: 3940 - protein, 78 aa, Homo sapiens
RGLHHQRAQLPAQHGDRRTAGERGVGAAAAPRGRRRAGSPAGTLRALCAGGSQLRLPGVRAAAVPARRCHSGPAPATR

SEQ ID NO: 3941 - protein, 78 aa, Homo sapiens
RSPAPAPPLQPRPCPLALAALGPPKPCPDVWLAAASEPPQCHPRYPPHPLSLPGAKAGVHQPPPARPPQVQPPPAQSL

SEQ ID NO: 3942 - protein, 78 aa, Homo sapiens
SLMTSTFTSSHFKWILLLTILLRGARPVCHLQARGPAPALPSQFSSTPGSSSQTVARHQLLMMKMLHHCQPNLLIFIH

SEQ ID NO: 3943 - protein, 78 aa, Homo sapiens
TTPLPALLPGHPHPAALPCPACHPTLTCRRLASRAHFPRRRPLPPPRPRRRQPRLPRPLASWCPRTRGLWARCRWGAT

SEQ ID NO: 3944 - protein, 77 aa, Homo sapiens
ARQPSRPTGRTPTTRLMAPVGSVMSCSLLTQPSPASACTMPPLLHPQWAPHSAGLSPGACRPACTCISMTTISRATW

SEQ ID NO: 3945 - skipped

SEQ ID NO: 3946 - protein, 77 aa, Homo sapiens
PEDGISPCTLPGSTGHLPHHQERHLPAPAQPGRLRQPRGWQAQLRQQPHQLHGRPLQLRPGLWVLHHLPPAPLGKAA

SEQ ID NO: 3947 - protein, 77 aa, Homo sapiens
QPPGLRAGQGAGLRLLHDLRPGRGAVVRRLHRALRPGAALPPPAGRGEAAARPAARPRGLPQRKELPRASQDRERLP

SEQ ID NO: 3948 - skipped

SEQ ID NO: 3949 - protein, 77 aa, Homo sapiens
TAEWQQRQLSGHAGHGHLGGQHLRFLQWCHLGPAAGKAGLHPVPPQSPTHAQAAPATHRPRRVWQREAGRWGWHQPE

SEQ ID NO: 3950 - skipped

SEQ ID NO: 3951 - protein, 77 aa, Homo sapiens
TSRCPMTLLSTLTRKILNVKRSQGSSPPTVVACPRSSSTAPPMWPPSSTVWLSRPSGSRAPAKPRSTRCCWCSLTVW

SEQ ID NO: 3952 - protein, 76 aa, Homo sapiens
AWSALRVPREKRAQWVSVATLGPLDPPVNRGFRALLEKKGRRVTQALQASLGKMALQDYVVSLGTEGFLVQWELLD

SEQ ID NO: 3953 - protein, 76 aa, Homo sapiens
GLRVTPSTPCGALIGQRSCVAGGKPDGDARQTPDPRAAYCPCLCPRGWWLPWPNPHHHRLLHPLPCQAQARSQSQS

SEQ ID NO: 3954 - skipped

SEQ ID NO: 3955 - protein, 76 aa, Homo sapiens
HPHRSPPTSCPPLLEAFPLPRASLRATVPRHSSVLATGLHLHRQISLPLRGFLLHQPLPGQHLWLSHRLRLRLPRT

SEQ ID NO: 3956-3957 - skipped (2 entries)

SEQ ID NO: 3958 - protein, 76 aa, Homo sapiens
TPSPPTTSQSQPRPSLFPQMGWEPRVPSSAWRRPHSPTRAPRWVGEGCRASPVRRLRTPHTTSPSAAPAWTSWTCC

SEQ ID NO: 3959 - skipped

SEQ ID NO: 3960 - protein, 75 aa, Homo sapiens
APWSCYSPASPRPSWGPSWKPSTCAPPAETSSAGPSRRSVATGTAPSAWPASSALGLRTVLPVFTRAYMKKAFLF

SEQ ID NO: 3961 - protein, 75 aa, Homo sapiens
PGGRSSHQASSPSPTATAKPAAGERRPSAAWQQPPGQEQEPGTPRRQGGLRSRGPEAAWGPPLLDFRPALPRAPP

SEQ ID NO: 3962 - protein, 75 aa, Homo sapiens
RGLRGAGARAGLRLLRHLRPGLGDALRGVHPPLRLGPALLPAPRGGEAPAHTDARARRVHGAGGDRGHPGKPAAL

SEQ ID NO: 3963 - skipped

SEQ ID NO: 3964 - protein, 74 aa, Homo sapiens
GAPGPRPARAPRGRLPGVSARGTHAAGQPRPRQQLLQPPVRGGRGRGAPSRSLHPLPRSACRRLAGAPGRGRAY

SEQ ID NO: 3965 - protein, 74 aa, Homo sapiens
GGIVPTRVPRSHLCLSHPLPKQRDPDRQPRKKRRNLRRVNPGSFVGYLERKRQKLICQMTRTNRLFGMKRKTSG

SEQ ID NO: 3966 - protein, 74 aa, Homo sapiens
GTHAEHLQRHQGDSEPPGHRAGRHPQLLPRLPALHAAGHARGAQARHPPQRRLRREQEEPEPGEADADPLGGPV

SEQ ID NO: 3967 - protein, 74 aa, Homo sapiens
RQTSFCTLTWQPPRQVCLGFSKSTAPGGTTRGRMCSRGQACWHTHTSSWRRPLGSWPSTGTHTGSWPASWGPQV

SEQ ID NO: 3968 - protein, 74 aa, Homo sapiens
RWLPGGGSPWTSRRGPPWSSTTPCTQGVREGTASGKTRGEAMGSGQATVTSMSPGPPCRGSGASSFIRHTGNPP

SEQ ID NO: 3969 - protein, 74 aa, Homo sapiens
SMVIRMSGCSSSSELTQTRGPRRPPGHQCYLSPHETWKVPRMQPGSRMQRLLKVLRTPQAQKNLYLHQHQQSSN

SEQ ID NO: 3970-3973 - skipped (4 entries)

SEQ ID NO: 3974 - protein, 73 aa, Homo sapiens
PAAAPAAARGCPRPLRLERGHRPRPASRLLGHRALPVLSRHGPHLLRGGDRPPARPEEIQDVLALLVPGTQAF

SEQ ID NO: 3975 - protein, 73 aa, Homo sapiens
PAQPAVWSLAAAPPGEESRAGAHSHCTQGDCCLLTGPRSHHRGHLPEVGQHPSGPGSAAEVQHGAACGFRPVQ

SEQ ID NO: 3976-3977 - skipped (2 entries)

SEQ ID NO: 3978 - protein, 72 aa, Homo sapiens
AQMPPPMPALGSSGPHPPVPPTHPNMEGLCLPRACLSGACRTLPETLRTAPRKSSLMPTKASRTVRRSSPRR

SEQ ID NO: 3979 - protein, 72 aa, Homo sapiens
EGRDHPVPAQAVQLSGHLCRWSGLYHSRTVCHSTARFDQAAPVGNATVSFSHDAWQHRIQCRFGCICSDYFS

SEQ ID NO: 3980 - protein, 72 aa, Homo sapiens
HCLWLWCRPSWKGKGASAPRGPGMPNSLNQGIPGRYLTGGLWAWKAGTGAQRVCCLRCCFSPLKKVWNLQGL

SEQ ID NO: 3981 - protein, 72 aa, Homo sapiens
PLSPAPPAHARHRARLPRLGPKQQLQPRSLATAIWLPASRGPTYPHTALTPVTLSGHRCHAEVLRLASNRQS

SEQ ID NO: 3982 - protein, 72 aa, Homo sapiens
PRASIRISHGSPRSYASAWYAWTSSTDAPPWIHWPSTTPTLWLPAGASPSTQTHSPATSSPSRPTSRPSPSV

SEQ ID NO: 3983 - protein, 72 aa, Homo sapiens
QAALGPRGGRGTGRAGPLHVGTEPGLCGPPPDPTEPPAACQAGSREQEPAEGSHPARDPDRECRGLAVRGGH

SEQ ID NO: 3984 - protein, 72 aa, Homo sapiens
RRPLRSWTPRTRGAHHCLWPHCLPGPHLKTSLPLTCLQTPVPDPALPGQTLPPLALSPCPSPRNPQPYSQQG

SEQ ID NO: 3985 - protein, 72 aa, Homo sapiens
SSAGHKLVNREPGSWAACTCGVPAPPGGGWAKEGASEPSMDACLCLPAPYAPHTPQHWPLRGSGDTGRGSRL

SEQ ID NO: 3986 - protein, 71 aa, Homo sapiens
LPGEDPGHGLPGRLRPAHGLHPPGRQEIQVCLPQLGLAGGGQGRPSHTWPRALPPRLASQGCPVDAPDCVL

SEQ ID NO: 3987 - protein, 71 aa, Homo sapiens
LPRLCEVQKHQRRLPVSLRGPLRVRRRWENLRRLREAPSGDLDLHVAGCSADRRLRRSHLDGDLQVDTHWH

SEQ ID NO: 3988 - protein, 71 aa, Homo sapiens
PGLAAPIAWATGPTCVMWPCGPSRSLASSLGSTPNCMPSPGVMTGGSAWKTTAAKVLWSIMSDSQEVTGWN

SEQ ID NO: 3989 - protein, 71 aa, Homo sapiens
PRPSVPLTAPPRTLWHKLRPQTVPAPRTTLRPPVPPPQPKALLAASSRKPQNQNPRPKPRRPPEWRRSLSA

SEQ ID NO: 3990 - protein, 71 aa, Homo sapiens
PSAPRPAATPAAACQASASHPAPPFTPAPQVGPLLNRSPPRSPLPAYDTFPPDVTVPEPDPPVSTPAKRPA

SEQ ID NO: 3991 - protein, 71 aa, Homo sapiens
TALPTASSLSTVTALPAVPSLPYGLTRTPSEPRAATPHYPPRTDGTAGAEQPHVEPERVPGARGQDAGGRM

SEQ ID NO: 3992 - protein, 70 aa, Homo sapiens
AATHQPWQGRCSGPLRGELMPGGSCWRLGGLCTAKWPGQYGPTWASCPLAQQCLAHTQFLRALGSPWGRD

SEQ ID NO: 3993 - skipped

SEQ ID NO: 3994 - protein, 70 aa, Homo sapiens
CPAHSSPLGRSLQVLRGSREAPPVPGPARGLPGPRPEKGGRREAPVVPEASPRRALLPPGRPERRPFQLL

SEQ ID NO: 3995 - skipped

SEQ ID NO: 3996 - protein, 70 aa, Homo sapiens
NTPASSYLTAASPSRPPARPRSCRTHPSTVTMTVAWRSLRRRPASHPQGLDSVPWPCLRITMSAPPLMAA

SEQ ID NO: 3997 - protein, 70 aa, Homo sapiens
PAVRALQLRGHPGRDPALRVRASQYLRHLRPDRAHRGFGAAEPDPGARHLHRGLVCEQPGVDAEPLRTGA

SEQ ID NO: 3998 - protein, 70 aa, Homo sapiens
PSLRSFPRDCTPSTESAAAFTLTSRTRSRLPLSSSTGWVAQTPWTMLACTGMWGALLLTSPSTGTTSASA

SEQ ID NO: 3999 - protein, 70 aa, Homo sapiens
PVASANGAAVGVAGAPCLTSIQARPLPTSPAACRLASSRATSVRQSALPRWGPEKGSWASAPGLMVTATC

SEQ ID NO: 4000 - protein, 70 aa, Homo sapiens
RAFRPCRGAWKAWYSRAPRQGWGCGRGRKARREGRTGRERRTWRTGQRWPSWTPWNPWAPRTPWPQGVCG

SEQ ID NO: 4001 - skipped

SEQ ID NO: 4002 - protein, 69 aa, Homo sapiens
APPALVAPRGLLCPALHLVKPRVLHQNLDPTSSSFSKWCRPWLEQMLHSCRIQKSDFSNNWNSSTQWGS

SEQ ID NO: 4003 - protein, 69 aa, Homo sapiens
HLLPSPARGDRRGQRHLHLQLLQHIGELRAKLVPHEPQQPDGQAGRLPRGPQPARPGLPLPCHTTAQRA

SEQ ID NO: 4004-4005 - skipped (2 entries)

SEQ ID NO: 4006 - protein, 69 aa, Homo sapiens
PTISSSTTGARSFLSWTRTWGLPQCLWNAFLPKSAGVSVSTYHSAYAATAASSQEREKNYKNSGSKPGR

SEQ ID NO: 4007 - protein, 69 aa, Homo sapiens
RCGRPALTPRRCLPPHPRPACLATSTRPWSSWGPASRARGETRLQNPSCWFRPLGPSRWCLPFPSAASQ

SEQ ID NO: 4008 - protein, 69 aa, Homo sapiens
RYLPPQLPCAEEGAEAPSDPDRRNHNGGEAGCGARLGHQRGGWLPPLLQRPWRGLLCLCGHHARHQVSV

SEQ ID NO: 4009 - protein, 69 aa, Homo sapiens
RYMRRRPPPPASTRVTAARPSPARPTGCPCLSASSGTGGPGHPARCLPSVVSGGGSSKTSCHSAVTGGR

SEQ ID NO: 4010 - protein, 69 aa, Homo sapiens
SQVRQKHLDGAVLSRDRQSVKIADLSLPPSPDATPSLQWTTADFTELLPVRPTSTHSVVERVQAGLLNP

SEQ ID NO: 4011 - protein, 69 aa, Homo sapiens
TSPAEPVRPHFQFSAEHRPHRLSSGHPRPPPPPPDDDPTHAHPGAPLPGRHAIRRLRQPLCPSGGHQES

SEQ ID NO: 4012-4014 - skipped (3 entries)

SEQ ID NO: 4015 - protein, 68 aa, Homo sapiens
RLPLLAGHGDLQRCRRMPVQPVCEWRLSEPGRLLHLQMWPWQPAGPLWYLLSRQHQGHLLAEDPGEPL

SEQ ID NO: 4016 - protein, 67 aa, Homo sapiens
AQRTQRLQHLWTGGTPARWKSCGTSWQPISVAPGERTDSSVTGQAQQWPLRARRARRAPACLRRRLS

SEQ ID NO: 4017 - protein, 67 aa, Homo sapiens
ASPLKRDPQQGQFIPSQPPTLPWTLRKQPQGPSCSRGSQRAVRGTSPSQGILGSTGCSLGSRLHSWC

SEQ ID NO: 4018 - protein, 67 aa, Homo sapiens
LRGHAQMCRSHGTKGLTCGGMSSCKRQGMSVSPSGVMPRTHSSSCTPVAPQANPRVWFTQLGATCSM

SEQ ID NO: 4019 - protein, 67 aa, Homo sapiens
PASRCHPCGPAVHGPAADVGSPVQALAWPHEPGLVPDRRRSSAVPAFRRGLTSACCPAGRGLPCGVP

SEQ ID NO: 4020 - protein, 67 aa, Homo sapiens
PTHPALPRSRSRPSASPLRGSAFPQPWAPSASPSPTGIWSCPFYQTHGPPGSPSYHSRALVCWPVHP

SEQ ID NO: 4021 - protein, 67 aa, Homo sapiens
QRCHRHRAPWLIRTLPMSPAQAVPPRTPRNAQPQSCPPQRPPRPPCPPLPCSRGPSTQPPDGPRSRL

SEQ ID NO: 4022 - protein, 67 aa, Homo sapiens
SVRSTRKVSTMTSCSMAPSTPSSSSGAKAWRRSPEAPSPWSCSNIMKPTPGPTPPAASTTSSSGSCG

SEQ ID NO: 4023 - protein, 67 aa, Homo sapiens
TPAGSRCQVGAGFACSPGVQPGGSKPQGEAREALSYDPVPGAAAGGGVGGRHPPALHLTLEIPCGHG

SEQ ID NO: 4024 - protein, 67 aa, Homo sapiens
VVSCSPCSRSAPRSPPSARPKAAASAPKPGYSNMATCLPGTYVPTHSAHPSHSQRPSLPCRSFTACK

SEQ ID NO: 4025 - protein, 67 aa, Homo sapiens
WARGDWGKNWTQRMPRHAAVWPWESPLPMALHLSVFPDLHPLGLACIRHRRDQPPHLAPGRASPPGR

SEQ ID NO: 4026-4028 - skipped (3 entries)

SEQ ID NO: 4029 - protein, 66 aa, Homo sapiens
QPQPPPAPPAAVAATGGAGRGEGAGPRQPGRGPPGRCGHREVPHPQGLSPGSADGGFCALPLQRHF

SEQ ID NO: 4030-4031 - skipped (2 entries)

SEQ ID NO: 4032 - protein, 66 aa, Homo sapiens
STSRCTWSRTSSWPSAAPASRARSAACTASARSAARRTAPTASCCAACWPSACASARTGSTSTITT

SEQ ID NO: 4033 - protein, 66 aa, Homo sapiens
TRLTFRERTSTSPATRPLTHPRSILGVSMGYRSNTHKFSLSPKSRQIITGPMPVLSLTWLLAAIIP

SEQ ID NO: 4034 - protein, 66 aa, Homo sapiens
TTAASGPASSACPTTTTSPRGRTNVSPTSRMSTVARATTTASSPRKGSSHRGPSCMASPSPTPPGP

SEQ ID NO: 4035 - protein, 66 aa, Homo sapiens
TVALLQAGPVAAVLFNFPPAQNLAARPPGEQQLNGNDVEGVSSALRFGKRVALGPGRRSQHRPARR

SEQ ID NO: 4036 - skipped

SEQ ID NO: 4037 - protein, 65 aa, Homo sapiens
ASSTECWQRSPDPHAAPTRCQDAQRNGSLEPAEQACPAWDLTDQAPTSAPTAAQPPPAEEACAGG

SEQ ID NO: 4038 - protein, 65 aa, Homo sapiens
HAVCGRCGVPAGVPDPGGRGRRGQRGPALLQRGAGAHVRAAAHGDRGPESGGAQRAPEGGRRPQA

SEQ ID NO: 4039 - protein, 65 aa, Homo sapiens
HRLRPKRRAAQPGPRKAAQGPRRGGTSDPPRHPAAGPARGEDPGGRPGERRQGGEEALRDGQNCV

SEQ ID NO: 4040 - protein, 65 aa, Homo sapiens
LLRILRLRRHLPPAAGLPVTGSPRSFTDTITYRDSRFLRPSKRPSWYNILTVNRPVVILARTQTT

SEQ ID NO: 4041 - protein, 65 aa, Homo sapiens
LTCGVLGASWQRCGPAAPSCRATRSSTNSPSSVSSAAPSPLRCGQTWTTMSCTKSWSWSRARSGR

SEQ ID NO: 4042 - protein, 65 aa, Homo sapiens
PAVGLVCWERLVRGGSGTLPGSVGPQLLPGAGEAGGRRVRVPQRGGAHVQPILCLPAALHRLLRR

SEQ ID NO: 4043-4044 - skipped (2 entries)

SEQ ID NO: 4045 - protein, 65 aa, Homo sapiens
RGRRAAPRHLLGKSPPSRNSGPEAGPQPRQSRLETPQLAGLWSRPGPHPRLSLPEGRRTDLDCSP

SEQ ID NO: 4046 - skipped

SEQ ID NO: 4047 - protein, 65 aa, Homo sapiens
RLEGQHLRRRQEQQLPAQPLCEWWHLRGQRGLLLLHLPGRLGGSYLHSQYQRLQPSALLQWWHLC

SEQ ID NO: 4048 - protein, 65 aa, Homo sapiens
SAAAPPLRATLRFYRSRGFRNPQSPWQGQGAWGGAAAATRITGAPGHPRPSPCPPASCASPRPAR

SEQ ID NO: 4049 - protein, 65 aa, Homo sapiens
SPWCHLGPGQQARLGLHRPSSPQCHLGLRLCIRLSFYSGAQRHLCQGYHNPSQQEHSILNSQPPL

SEQ ID NO: 4050 - protein, 65 aa, Homo sapiens
TRPRTPERSASGVRWRPCGTWAWPSSPVPSPRSSPQCPSSSASSPHLPSSARLWHSTRACPSSTR

SEQ ID NO: 4051 - skipped

SEQ ID NO: 4052 - protein, 64 aa, Homo sapiens
ALLAHQERWCPWPCRMSQPQHRRTMAARLTGRTSQTNATIFQLRKKFLRMQSFSVKTSLHILFS

SEQ ID NO: 4053 - protein, 64 aa, Homo sapiens
CQLLGALTTSTGTKWMTQTSSRSEVTPSLVAVRPSPQKALRPGWASQRLNSCMLGLPRRSQVPV

SEQ ID NO: 4054 - skipped

SEQ ID NO: 4055 - protein, 64 aa, Homo sapiens
EASSCMAHLAVGRPCWQRRWHITQQLHSSGSWARSLYRSIWVRAPAWSGMCSAWPRRMHLPSSS

SEQ ID NO: 4056 - skipped

SEQ ID NO: 4057 - protein, 64 aa, Homo sapiens
PDPGRARRQPLPGQWRGPGAAAAAGPGPGRRPPAAAQLPAGRPPSQPGAAARRRGGARARGHAL

SEQ ID NO: 4058 - protein, 64 aa, Homo sapiens
RARPGRRRRFVVVAVLHARHIPGPLEDSGAAAARVPRRLLVVFVRRCRQVWPRRGGGRRHRRHG

SEQ ID NO: 4059 - skipped

SEQ ID NO: 4060 - protein, 64 aa, Homo sapiens
TLWTLCSSTPTCLRTCHLMPGPDSSGSRSLWPPQRPSNSRKFGWQMRASTPAPCLTHCTFWTRL

SEQ ID NO: 4061 - protein, 63 aa, Homo sapiens
ALLHPREPWTCLIPLLAWKKTLESWMEPLSCWGWGGCSIKPPLPRRWTTVLREPWHGMQEIRP

SEQ ID NO: 4062 - protein, 63 aa, Homo sapiens
EKACGHPPTDRAETLLKFLLKGILALAIGPAGALAGPVLTTLGTQRPLPWAAPCPATASPSPL

SEQ ID NO: 4063 - skipped

SEQ ID NO: 4064 - protein, 63 aa, Homo sapiens
LHMQPSLPWQGLKDLGSLVSLCCTGVSPALPQTCHCKRRSSGRPAVVASRSGTPCHACGMPVS

SEQ ID NO: 4065 - protein, 63 aa, Homo sapiens
RPRARPQAASPGSMARAWRSGCSGTWPWTAASSGCSAPCGPTPVTAWRCRQAAWRSTGPRSRS

SEQ ID NO: 4066 - protein, 62 aa, Homo sapiens
EGRDHPVPAQAVQLSGHLCRWSGLYHSRTVCHSTARFDQAAPVGNATVSFSHDAWQHRIQWH

SEQ ID NO: 4067 - protein, 62 aa, Homo sapiens
FALRPSTVPFLTRAVPMKPSGRCLLSSPRMTSSRCWTHCLSTRACSPTSLTSSIYKKAPSPR

SEQ ID NO: 4068 - protein, 62 aa, Homo sapiens
PVGPAKLGCSMTTRQPTAVSWPCWLMSSSLSTACLAWTLTGSLAREATRRARSLSPTWNCSA

SEQ ID NO: 4069 - protein, 62 aa, Homo sapiens
QPREHSVFSTCGLEGPQPDGKAAERAGSLSLWLQERGPIPQSQARPNSGPSEQGGQEGPPPA

SEQ ID NO: 4070 - protein, 62 aa, Homo sapiens
RPTPPPSSTLPPGKAASSISMTTCLATLQVPQLQVGLAEAAGTDRPAPWCTGGTATPSRRSP

SEQ ID NO: 4071 - protein, 61 aa, Homo sapiens
APAAWETHQNEVPSAPLCQSRSCCVPCASAPHTLPPAFCWLLTLGAAQLNVVAPGGLPQVW

SEQ ID NO: 4072 - protein, 61 aa, Homo sapiens
CWSPLQPRARQRQTRCQVRPPPGPPCLPLARPPRPAPARPAGGPPARTPRGPSEKRSRSPR

SEQ ID NO: 4073 - skipped

SEQ ID NO: 4074 - protein, 61 aa, Homo sapiens
KARCPRVGCLHSQLPHPHPTPTSDTPKVSSLARRLDFQEEPMTGFFNLIPPSSSPSTPRGT

SEQ ID NO: 4075 - protein, 61 aa, Homo sapiens
PGGDTSPGVHPGFPGPDSDLHLRGHWRPHPHHQLEAQLGPHPLSSQGDSDQRGWPWHTDHP

SEQ ID NO: 4076 - protein, 61 aa, Homo sapiens
PSPGPGLWGIHGAASGCSRAGCFRARAAALEACDSAGEGWGRRSKDQDCPHSLLRPPHFSS

SEQ ID NO: 4077 - protein, 61 aa, Homo sapiens
RGAALAISMGVRVMWASFKHSTLALAVCHIISRITLGLSLQGVLSTNSRLPASSSSSKSSS

SEQ ID NO: 4078 - protein, 61 aa, Homo sapiens
RLALQPAAPACRSGGRRRLRERAGAQPHRRLPAAAPSRARACVPGAVHPHWTRAALQGVSH

SEQ ID NO: 4079 - protein, 61 aa, Homo sapiens
SPAVSGDSQTPFCLPLRMKLAAWSTWRIRRGRLCWRKLLHLQRCTGRPDSPSKVPDSVRRM

SEQ ID NO: 4080 - skipped

SEQ ID NO: 4081 - protein, 60 aa, Homo sapiens
AVTRASAPRATAAAGAWRGRRPPTARSSATTRGPPSSTSRAVGRPPCWRGPGSTTHTSRP

SEQ ID NO: 4082 - protein, 60 aa, Homo sapiens
GCFWPCLWNSLLRFCPASCSGCYSWTIPPTGSPFSCTTTRSSMNPTSLTPGRSSRTTSQL

SEQ ID NO: 4083 - protein, 60 aa, Homo sapiens
PETDGRPPAPTSRPESLATAPTPDQPRRTQQKQKPQNGKAPCSFNRQKHETSPRSFISSV

SEQ ID NO: 4084 - skipped

SEQ ID NO: 4085 - protein, 60 aa, Homo sapiens
PRPPGAFRVLEEGRCKTQGRGRKDHDPWREADDVTYTQERCRHVCVRSLQHGGRTGECGS

SEQ ID NO: 4086 - protein, 60 aa, Homo sapiens
RGPSDLQREGMHVPEVFPARIGGQQRAPVPGPPKLWGLRHRNQEWPGPGSLGQALALGLF

SEQ ID NO: 4087 - protein, 60 aa, Homo sapiens
RRGGGEEVPGAAGAGRAEALLPWLPPAMDRHQDRGTHALAHPQRPQPDPPGAQAVSPDLR

SEQ ID NO: 4088 - protein, 60 aa, Homo sapiens
SLLCNPPLLPPSPRSSPSHASSAARRSNFRATWWCTGAATRARSPTSATCATTRAPRPAS

SEQ ID NO: 4089 - skipped

SEQ ID NO: 4090 - protein, 60 aa, Homo sapiens
SVLAVSERGGRNDPAGCPADHPRADGRSHSAPDSHPHGLRWPPGRLWQSNFHYQFGYYLH

SEQ ID NO: 4091 - protein, 59 aa, Homo sapiens
GVREAHGAPCDILCNHHLSSTTSSHQHFLNCRFWQSASHQCRILWGHQFWWDISKCWQD

SEQ ID NO: 4092 - protein, 59 aa, Homo sapiens
HEERSQLSADGPGRREQRPRPSSRELCGSPPAQPGPDPHQPKQEEVPLSTCAGCCVPGL

SEQ ID NO: 4093 - protein, 59 aa, Homo sapiens
PAALDPRELAVLGLAGALPFLPVPGQHDQERVFPDAGQLHPRLLCGLRGSSMDDWCDGN

SEQ ID NO: 4094 - protein, 59 aa, Homo sapiens
PERPRPHHRSRHLHRQPLPPQHSHPDGTSGWSPCCPAWGSGPLASRPNPLPGRCATRGH

SEQ ID NO: 4095 - protein, 59 aa, Homo sapiens
RSPRPGASALSSRGLPPWPQSGTVGVQEEQEAPREGGAGAAGAPGAGQEADAGLPGPPG

SEQ ID NO: 4096 - skipped

SEQ ID NO: 4097 - protein, 58 aa, Homo sapiens
APQLPMNWSPLCTPIPRTGPRHPQTWRTGLKCTALWVAVFLKAGVTPKERSPGLNQAG

SEQ ID NO: 4098 - protein, 58 aa, Homo sapiens
CCWPIPHDSGLQPSACGPEQPHPAAPSTSARLSFSRGSTSSVCESSCVALESASRTCQ

SEQ ID NO: 4099 - protein, 58 aa, Homo sapiens
CGPLTPFPVPRPSSPPPKKTCSKATFGTSLSPFATPTRSGTCCWAWTAPTAWTVAWTP

SEQ ID NO: 4100 - skipped

SEQ ID NO: 4101 - protein, 58 aa, Homo sapiens
PGPPGAELPGGALPISPAHLSPPGGYPPGGQLLGVGLERTPGPSPCGCCCLHLDTTNL

SEQ ID NO: 4102 - skipped

SEQ ID NO: 4103 - protein, 58 aa, Homo sapiens
RQAAAAPQGPCCGHFPAIRGWLQHLWGLFPTHEGHQSPQLAACGDSQPFAGRGGLVPL

SEQ ID NO: 4104 - protein, 57 aa, Homo sapiens
ADFTEPGQAISPHPTLELSPATSNPHPLGPQIWPPGLPPSHMLPSPHLATRVSRLTC

SEQ ID NO: 4105 - protein, 57 aa, Homo sapiens
QGLTHLEEILLPRRKPHAALQHGRAVHHQGDQPDKHFTEPDPTVQCENFPHQNATGT

SEQ ID NO: 4106 - protein, 57 aa, Homo sapiens
RAPRRAAGAVPAAGQPPGPAPLPPVQRAAAEQEAQEGSSERCGERQRRWLGAPRKRS

SEQ ID NO: 4107 - protein, 57 aa, Homo sapiens
RTTRTFTPPFPWSRTAPPSCHPANPLPGPTSGQMGPRAPLGCCLPPPPRPPTCRRAK

SEQ ID NO: 4108-4109 - skipped (2 entries)

SEQ ID NO: 4110 - protein, 56 aa, Homo sapiens
PERKTATVRPKQRTRTMRLGPTQPRPALLKLGVPSMETHHLQPPPHSAAHGPPLAL

SEQ ID NO: 4111 - protein, 56 aa, Homo sapiens
PRSCRRRPSCHRCTAWCCQSGTCSGRSRPSWPSCPIPRRDPRPGHRSASPGPKPSL

SEQ ID NO: 4112 - protein, 56 aa, Homo sapiens
QGEESLRGLGLGGWQQVGLGVVQTDWSQRWYAWWWKVWRGSSGASQGGMLGRSHPC

SEQ ID NO: 4113 - protein, 56 aa, Homo sapiens
RAPAPGCSQRAPLALPALLPATWCLGPAARPQPLSSLLQDTAAALPTPLLRTWRGL

SEQ ID NO: 4114 - protein, 56 aa, Homo sapiens
RGCFATSLRPSPTCFLTDPRCWYFPPPPCIAPPTPTSPRLPLWRSRSFPCWKTCLT

SEQ ID NO: 4115 - protein, 56 aa, Homo sapiens
RPWRFTGWSTGRRRSRRRSGSTACAWAPLCGGGPSAAAKKSMSSAPRTTPWQQPWL

SEQ ID NO: 4116 - protein, 56 aa, Homo sapiens
WASMASSRSPPTPQETWLPSPSTSAPSAGTAPQASTMECTAARGARASSSGRCART

SEQ ID NO: 4117 - skipped

SEQ ID NO: 4118 - protein, 55 aa, Homo sapiens
CRRPRRRPGLPAAATPRAGPPAASGIAATRTPSATCTVAPWTAPPTRWRPATGPA

SEQ ID NO: 4119 - protein, 55 aa, Homo sapiens
EPCGEGPPPARRRECRGVHRGGRRVLRQEGDSQGLQNHDCAGQGHLQERALRSPG

SEQ ID NO: 4120 - protein, 55 aa, Homo sapiens
FWGLLLLHLSTSSLHHFLPRHLDGPLLQNLPFRVLGSLQTIKHPSPWPPQPCWEM

SEQ ID NO: 4121 - protein, 55 aa, Homo sapiens
GQRPSPRPPLAPACVPRAGQRWPRDPWPRRPYARGLLSHRQQAADPSGGNQPNLN

SEQ ID NO: 4122 - protein, 55 aa, Homo sapiens
HAGGHQLRFCTEGFLGALEPAGGGAPGGGLGLCPVEAGAGADRPSPPRPAQRRTG

SEQ ID NO: 4123 - protein, 55 aa, Homo sapiens
HQRAPFPVAADEVSHWGRHDKKGPWRCLQPAVRLLCHREGRAGHEGSSWGGGAHL

SEQ ID NO: 4124 - skipped

SEQ ID NO: 4125 - protein, 55 aa, Homo sapiens
PLRSLHLPRLGQRAGLGHRHILHGHGAHLCGLQVLQPAWVLSRETGLRHCTREGP

SEQ ID NO: 4126 - protein, 55 aa, Homo sapiens
PWEVAPRCGRPKLNGATRSGCACRVRSHRHPSVPCPLPSSGPWRPRSVRCGGQPG

SEQ ID NO: 4127 - protein, 55 aa, Homo sapiens
QSLPSLLSRHQDAEWQHSPNGRLCPALPAGHRLQHGVGPGGCIPAPRPVAGAGEE

SEQ ID NO: 4128 - protein, 55 aa, Homo sapiens
RAAAGGGLHVTGAQRGAVRAGPAAGDQGPAGPAARFRAGTPAPATGPPRRGPSHL

SEQ ID NO: 4129 - protein, 55 aa, Homo sapiens
RAAPPPPQIEAPPPTALAAAAQPPRWHLRVVPLLPRLGVGATRIETESTTRPMCD

SEQ ID NO: 4130 - protein, 55 aa, Homo sapiens
TCRRPALPSLYTPTPTSRLGCPVRLTVPWTAPMSSTLSLRRTPTAQRWSPSLKAL

SEQ ID NO: 4131 - protein, 55 aa, Homo sapiens
TPMDSHRSSQDKTLTHPSMETTRRRVPHPTMTTRTSLPPTGMTRASDRPSSARCS

SEQ ID NO: 4132 - skipped

SEQ ID NO: 4133 - protein, 54 aa, Homo sapiens
ELRALGLVREPPAAKRRRRSRDWSRVTRGTAPLRTRSWKLSKLESGRWRKKLRS

SEQ ID NO: 4134 - protein, 54 aa, Homo sapiens
KSTTPRARQPWWPGIPCRATTRCGVLATRATWQPQALRGQGPMGTGRCSWSPVS

SEQ ID NO: 4135 - protein, 54 aa, Homo sapiens
NLTCAGNYTPDISQYTDWESQDLGARQRISGGLRISGPRRGEPTRRGSWRSGHG

SEQ ID NO: 4136-4138 - skipped (3 entries)

SEQ ID NO: 4139 - protein, 54 aa, Homo sapiens
PVSIKSERLSPAPGGPGDFPKTFPYPLLLARSLAEPLRPGPALRRLPLADGWPR

SEQ ID NO: 4140 - skipped

SEQ ID NO: 4141 - protein, 54 aa, Homo sapiens
SCTWCGRWRRQPSRRGPTVPPSSSTAVQGLGGPAASLPPASAASSCGRRVWWTS

SEQ ID NO: 4142 - protein, 54 aa, Homo sapiens
TAASIAPLTRPSPRNSARPAAVATSLQSRGCREPRWGSPGASSHPATPATSWRT

SEQ ID NO: 4143 - skipped

SEQ ID NO: 4144 - protein, 54 aa, Homo sapiens
TQGRGSARLPSRARPGLHWHHRHTMLPPKPRRWRRPWDPRKPACWRSWSSRTKQ

SEQ ID NO: 4145 - protein, 54 aa, Homo sapiens
WETLSTWRPSERWSCRSPASLPRMWCWCHQASMPWRATPPLLGATTSPPDASGT

SEQ ID NO: 4146 - protein, 53 aa, Homo sapiens
ARPLPPPQILERKRKGRPLGLLVAPRPAPRSWPRKLRRPGLGVLGTQAKELWH

SEQ ID NO: 4147 - protein, 53 aa, Homo sapiens
ILGRGACESGPCCCWGFWGWCLGSAWSLSTGTRRIRGSRQRVVMCCTLRSGTG

SEQ ID NO: 4148 - protein, 53 aa, Homo sapiens
KARCPRVGCLHSQLPHPHPTPTSDTPKVSSLARRLDFQEEPMTGFLPFHPPGN

SEQ ID NO: 4149 - protein, 53 aa, Homo sapiens
PHSSTCENRAPEASKGGRAQDSRGPGPGTEPALCGSGPSSPQQAPPAVHSGPC

SEQ ID NO: 4150 - protein, 53 aa, Homo sapiens
PSAPGGPGVESSPKCARLHGTAVGGCAVPVRWGASPRGLQPEWALLGRLPLAF

SEQ ID NO: 4151 - protein, 53 aa, Homo sapiens
SASSLSASLRPPGAPATFLRPSPIPCSSPGPWQSLCGLGPPCAGCPWPTAGPG

SEQ ID NO: 4152-4154 - skipped (3 entries)

SEQ ID NO: 4155 - protein, 52 aa, Homo sapiens
HLSGATSHSSSTTACGRQALPVCGSGEGLQPCSQRDHRSEHSCAGSAWASMF

SEQ ID NO: 4156 - protein, 52 aa, Homo sapiens
IAPLVKTEPQRPVKEEEPKIPGDLDQEPSLLYADLDHLALSRPRRLSTADPA

SEQ ID NO: 4157 - protein, 52 aa, Homo sapiens
LSYSFFTNVVPARWTCCVPSCSSLSSQTSVSCGSAPGCWPFHLISASAMLLC

SEQ ID NO: 4158 - protein, 52 aa, Homo sapiens
PLPLPPPYHWPGVRELPPVPSRLALAACHAPAPPPLPTLLLQPARPTLPVQL

SEQ ID NO: 4159 - protein, 52 aa, Homo sapiens
PQFHPLCHSPTPGHHQQHKPQPSRQPLGYRLVRPEPQHGPWPLVEPCPLPAL

SEQ ID NO: 4160 - protein, 52 aa, Homo sapiens
PSPHTVGRHQGLARCHWTEPSFSADVSSGNTAGPGSWEFCSPWLPHQRSPCP

SEQ ID NO: 4161 - protein, 52 aa, Homo sapiens
PSRPLPPDPVSKRLQSQGPAKPPPPRKPLPADPQGRCPSGDLPGPGAGIPPL

SEQ ID NO: 4162 - skipped

SEQ ID NO: 4163 - protein, 51 aa, Homo sapiens
FHHIATDVGPFVRIGFLKIKGKIKGKSLRKPNWKTQHKLKRALMFLIVKKL

SEQ ID NO: 4164 - skipped

SEQ ID NO: 4165 - protein, 51 aa, Homo sapiens
NPQRWRSHLSCDLPLPPPHLFPRSQHQSPLHHVPQLLHLPQFHSLRRDGPS

SEQ ID NO: 4166 - protein, 51 aa, Homo sapiens
PRRRPRAPHRASPAPPPPRVQLAGGGGHRRLRHRQLQHPGGPGEGYGPEAT

SEQ ID NO: 4167 - skipped

SEQ ID NO: 4168 - protein, 51 aa, Homo sapiens
TLCQLLPRDPTLSLPCLPRWGANPSEGVWPSPSPRAPARQAHRLQGEALCL

SEQ ID NO: 4169 - protein, 51 aa, Homo sapiens
VLGGLGPLFMTGMPTAMSWLEPSIFLVTALLWMFTSTWNRPRFRVSPGYGW

SEQ ID NO: 4170 - protein, 51 aa, Homo sapiens
WAARSWCESRAAAVAPLAPWAWGCPAGCTPPVAARACAATRPEGWRSPCTH

SEQ ID NO: 4171 - protein, 50 aa, Homo sapiens
AAPCRRGAPSGAPSPPPPPADPAPSPSRGTATPSSGRHPATRPLARILTA

SEQ ID NO: 4172 - protein, 50 aa, Homo sapiens
CPHLFLLAFGRRQKSRRAPAPSVWGRSRMPRHWRSAGIHSARAASPGLCR

SEQ ID NO: 4173 - protein, 50 aa, Homo sapiens
CRSSRTWASPCSLSAPAEATSWSCQPLPQPLPRSTCTLWTWMTCTSLSKS

SEQ ID NO: 4174 - protein, 50 aa, Homo sapiens
DPPAPRVPGAGAWSPTAPSRGARAPPSPTSSWWPWRTSSGPRATCQCASA

SEQ ID NO: 4175 - protein, 50 aa, Homo sapiens
KHCCKRITLRSSCSLGRDLYLWNPRILKGSGGYTDVIMMDATKCTLKAPT

SEQ ID NO: 4176 - protein, 50 aa, Homo sapiens
KTRRKVKILQINPKERKREAKMEKIEETERRKIHVMQNFKISAFTENANI

SEQ ID NO: 4177 - protein, 50 aa, Homo sapiens
LHRRAAHSRVPSPRSWGPRLGPAGRIGGNFRGPHPRAHRVQLLGADSWKQ

SEQ ID NO: 4178 - protein, 50 aa, Homo sapiens
PGRCRLTLCPRDSSLRGQPSPHPQGSHCLPTPRAGAHRVTCPAQGLESRP

SEQ ID NO: 4179 - protein, 50 aa, Homo sapiens
PHICISRCCLPVHGYSQQRPVHCHQRREWLWEDRKRPPDCSAFDFLGKGQ

SEQ ID NO: 4180 - protein, 50 aa, Homo sapiens
PRPGPAGGALLPRSLTAFVPHSGHGLPVSSGEPAYTPIPHDVPHGTPPFC

SEQ ID NO: 4181 - protein, 50 aa, Homo sapiens
SNRIRLHRLILPMKIPRQLPQMSKVKVMPHHSLKMRNLHFHILTWPSWMT

SEQ ID NO: 4182 - protein, 50 aa, Homo sapiens
SQAEQLQDCGRCQQEDPGATRCLHQKVPAGAWGALVWWEPAWGVCGRGGG

SEQ ID NO: 4183 - protein, 49 aa, Homo sapiens
ARTGTHTPRPPRARARRAAAGSSAAGAAFPPPPPARRARPRCPSRAAGG

SEQ ID NO: 4184 - protein, 49 aa, Homo sapiens
GGRGLRGLPPRPRVGRPAAPQQPAVPGAPRGQVPRLPPAPPGPPAPHRE

SEQ ID NO: 4185 - skipped

SEQ ID NO: 4186 - protein, 49 aa, Homo sapiens
GKTSTPLTSISPRWPSLLTCSWLGWHWAFRKGSPRRCWACVQAQRWCGW

SEQ ID NO: 4187 - skipped

SEQ ID NO: 4188 - protein, 49 aa, Homo sapiens
KARCPRVGCLHSQLPHPHPTPTSDTPKVSSLARRLDFQEEPMTGFVSSH

SEQ ID NO: 4189 - skipped

SEQ ID NO: 4190 - protein, 49 aa, Homo sapiens
PGPLRARGHPLLLGLYAGAGGNPAGLLHRRGHTPGEEVHTVCGGQLEQV

SEQ ID NO: 4191 - protein, 49 aa, Homo sapiens
PVLHSRLRHGLLQPVGPLHPLQTAGHRLLDPPQVQQRQVQHLREEWYLV

SEQ ID NO: 4192 - protein, 49 aa, Homo sapiens
RGGRHGGGHRGPGGPWLGLSMGPQPSAGEPTHTAHEEAELAEAAIQRGT

SEQ ID NO: 4193 - protein, 49 aa, Homo sapiens
RKSPLPLKQRAEDPPHQPWAHGMPDLLEGAASHLQQQCQPPTALPPSKR

SEQ ID NO: 4194 - protein, 49 aa, Homo sapiens
RLSFPRSGTQSSSGPPPHPPAPGQTGSVGPGHVLLRVLSPAAPGSTGQP

SEQ ID NO: 4195 - protein, 49 aa, Homo sapiens
RPPLGPRAASQSGRSGVQWTGASQRHMGSTSGSRPTCPGTSATLGSSTV

SEQ ID NO: 4196 - protein, 49 aa, Homo sapiens
SCPRAPRRARDRPRWAPPRRNRTWPLRPPARPHGAPGCLPSWQPRARAC

SEQ ID NO: 4197 - protein, 49 aa, Homo sapiens
SPTTPRWRTFTTTSRLSSRSPTRPPGPSRREPSRASWRSPTASSCLSHG

SEQ ID NO: 4198 - protein, 49 aa, Homo sapiens
VPTAWGLCSVLQGPSSLASKRHSRGPRRAGGPPGRRGWGRRGPGGGARS

SEQ ID NO: 4199 - protein, 48 aa, Homo sapiens
KKDACPSHSRGGLPMECQAPSGHHHQTCLVLGPSCPSAPMHSCLPGAA

SEQ ID NO: 4200 - protein, 48 aa, Homo sapiens
LAPRQTAAATAHHRTPRRALKSLPQKRARTPPFTRSLMRISRRNPHPP

SEQ ID NO: 4201 - protein, 48 aa, Homo sapiens
LGAGEAASLTPWCPFTLKSPAMSSPEHTWSFPTATRTGLCPTTVTTFT

SEQ ID NO: 4202 - skipped

SEQ ID NO: 4203 - protein, 48 aa, Homo sapiens
PAASDSGGVPAGCLDHHAYFGGVGGPVPAESCRGSSPNPGGTRGNGAY

SEQ ID NO: 4204 - protein, 48 aa, Homo sapiens
PPASLCRLAACCVTGNAKAGKKALLKMDWCCRVRSCPLTSCQSSSRIS

SEQ ID NO: 4205 - protein, 48 aa, Homo sapiens
PVQFSRKGLRVPEQPAVPRSPGTPCGNRQREGRGEGLPPRGRPGHLSR

SEQ ID NO: 4206 - skipped

SEQ ID NO: 4207 - protein, 48 aa, Homo sapiens
QQPPAEGGLLLELHPRLPRQPTRLLHLPGGQRLPPAADTPPRGPWQGY

SEQ ID NO: 4208 - protein, 48 aa, Homo sapiens
QTNRHQVPCPWCPWTVAPTALSPGRATEFPEILWHLPAPPWPWVPRGT

SEQ ID NO: 4209 - protein, 48 aa, Homo sapiens
RPPHSQQPFHSHCPSRSPQPSLRPHPHPLRAQGCNPSLSTTHRWYSWG

SEQ ID NO: 4210 - protein, 48 aa, Homo sapiens
SPTDHPGLHRLEICSARPEQVPRARRCDQKLQRCFCTRAVLAQAGRAL

SEQ ID NO: 4211 - protein, 48 aa, Homo sapiens
SRPRRRRPRRPRPPRRRPPQRRRPSPPPPPKGRATPSSALSTKRPSCA

SEQ ID NO: 4212 - protein, 48 aa, Homo sapiens
TAAPSASCLLFLGPAPGSACRLRTGFLGLRAIQLARTESGQRQQLQES

SEQ ID NO: 4213 - protein, 47 aa, Homo sapiens
EAPPPRPAPRVPRAAAAASPARRRRRSSTASPSPASAPWRPWRRIWP

SEQ ID NO: 4214 - protein, 47 aa, Homo sapiens
GMPYHQSAPHILTGATSQHQPWPSTSRSCMTSQPEMPTSYRCSRMRS

SEQ ID NO: 4215-4219 - skipped (5 entries)

SEQ ID NO: 4220 - protein, 47 aa, Homo sapiens
RKRPAGTPPTPTSRPASRPPAACGPWCPQRPGPPAPSCPTGTSCAAS

SEQ ID NO: 4221 - protein, 47 aa, Homo sapiens
RPKEVAETLSFRIPGTQSLQAVTVVGAAAAAAAASIARTGPAGRKAA

SEQ ID NO: 4222 - protein, 47 aa, Homo sapiens
RPPRIALSSPTPAAPRPIQLRLPGNPTTPQWTSPQPAHPPSTTPSYK

SEQ ID NO: 4223 - skipped

SEQ ID NO: 4224 - protein, 46 aa, Homo sapiens
APVPQPEQQRHRQRHLPDHACHQVSYLFSVFLQSREPAPQRGDVPL

SEQ ID NO: 4225 - protein, 46 aa, Homo sapiens
EGAAATPLGSPPRGLWAPRRPPLPTSSTTTSRAARRPHLPSPVPGA

SEQ ID NO: 4226 - skipped

SEQ ID NO: 4227 - protein, 46 aa, Homo sapiens
IISQFTLALPMWLYQESLPTLFCMTHGLLICSSGPRTLSVLMSISG

SEQ ID NO: 4228 - protein, 46 aa, Homo sapiens
IRPQASSHPRRSLPSLSKSSSTTIHPGTTSRTPTQPVTSAKPPPRL

SEQ ID NO: 4229 - protein, 46 aa, Homo sapiens
PHLQPPASTGPGRYPGRTHGLPLPGHPPDLEGDGDGPGGPGGPTPL

SEQ ID NO: 4230 - protein, 46 aa, Homo sapiens
PSASARQPPSSHPLSHPRGMHQQPGPLILDPLASCGDAGGSAPGPP

SEQ ID NO: 4231 - skipped

SEQ ID NO: 4232 - protein, 46 aa, Homo sapiens
QRWGPSAVPGLQLRGHRPDGRRRQASCPAGTPALGGTATPWEEPGF

SEQ ID NO: 4233 - protein, 46 aa, Homo sapiens
RAKVLGPRPALVSASGGGLRPATPRIPWPLAPLTAWLPRPPQRKMC

SEQ ID NO: 4234 - protein, 46 aa, Homo sapiens
RGGGGRRRRWRQQQSSLGLVSSWDGASLRPAPEEEAAAAAAPQGQA

SEQ ID NO: 4235 - protein, 46 aa, Homo sapiens
RKCPSHSNITRKHINILVHTFQGSLEWNSPGVQSHLLGQPHGRRAG

SEQ ID NO: 4236 - protein, 46 aa, Homo sapiens
RTATHVHPFLGEPRHPDGDRGGAQVIPWTPWPEQWTPSPSGGQRRA

SEQ ID NO: 4237 - protein, 46 aa, Homo sapiens
RVQRGALHRWGSEQQLALCRLPLHHHGVALPWDSGHLPPEHLPQPA

SEQ ID NO: 4238 - protein, 46 aa, Homo sapiens
SPSRSSITASLAAGLWWASVPSAPWRASCVTPTRRRVHPHRVAQTM

SEQ ID NO: 4239 - protein, 46 aa, Homo sapiens
TMVQGPAGHPLAMAQGPAGHPPTMVQGPAGLPLAMAQVTHPLVHIT

SEQ ID NO: 4240 - protein, 46 aa, Homo sapiens
TPAGPLSRTGTGPGAMGCLTWCVWTFVAWPQPHQLPQPLLGPQAPS

SEQ ID NO: 4241 - skipped

SEQ ID NO: 4242 - protein, 45 aa, Homo sapiens
EGRDHPVPAQAVQLSGHLCRWSGQVQHRQRQCELSPHHPVHVPQP

SEQ ID NO: 4243 - protein, 45 aa, Homo sapiens
GDCPRTMAGPSASLHPASGRASRKTWQRRLRACRAGGPAGWARQA

SEQ ID NO: 4244 - skipped

SEQ ID NO: 4245 - protein, 45 aa, Homo sapiens
PATTPTRSSSPARTEPPTHHRGHPTACEDKEGSEEESRHHHPHHH

SEQ ID NO: 4246 - protein, 45 aa, Homo sapiens
PGDGGRAPHAPRAAAEPDYSAGGPRAGRGARLLPVPKSPGGGGAV

SEQ ID NO: 4247 - protein, 45 aa, Homo sapiens
PPGRAAHSGPGGAPLPTTPRETETEQGWLGPWRHPEYPVLPDGAG

SEQ ID NO: 4248 - protein, 45 aa, Homo sapiens
QTPKGGGLTCPATSHYHLPTCSPGASTSPLSTTCPNSSIYPSSTP

SEQ ID NO: 4249 - protein, 45 aa, Homo sapiens
RARPGPRARLPSGIPARLPRALQEAFGESEHPPAAALHGGPSAVL

SEQ ID NO: 4250 - protein, 45 aa, Homo sapiens
RSHPRPTARCQAGGAPSPAASLRRSSRRAPTTRPTRMSWWSYTGG

SEQ ID NO: 4251 - protein, 45 aa, Homo sapiens
SPPCPDPAQVSSPPYPSLPHKPPVRSGRQQLYAVRQCQQRRVLLE

SEQ ID NO: 4252 - protein, 45 aa, Homo sapiens
WAAASEMALPSVDPTWISENPQKRKEHRDHDSSLNLEQSRRPSIK

SEQ ID NO: 4253 - protein, 44 aa, Homo sapiens
GAAAASCQSPPSPRETTPSSDATRRTRPIAAQSKKTMTAAGLTP

SEQ ID NO: 4254 - protein, 44 aa, Homo sapiens
GPSHRWQPKWGSIARCGTPGSPATGPSSTASASFPSPRSSCSAS

SEQ ID NO: 4255 - protein, 44 aa, Homo sapiens
HADDAPAARGHGAPRSPSGPRPGLSAPGTDRQQTVLPHGHGKPQ

SEQ ID NO: 4256 - protein, 44 aa, Homo sapiens
HQDGVAVARPVTARPAPRGAVGTCLGFVQLCHPMNLEDQEAQGA

SEQ ID NO: 4257 - protein, 44 aa, Homo sapiens
KRVALLTMWTCMDMLPKGAASCTETALVMRAPRWKTCYIQSSSP

SEQ ID NO: 4258 - protein, 44 aa, Homo sapiens
PDHRRGEEPRALGASPKPECPGPHASSDTQWLCPGRACIPRLPI

SEQ ID NO: 4259 - protein, 44 aa, Homo sapiens
PGGELGSRPGAHGTHPGPRSAGNPILPRGRLDKRSCIRVAPTIF

SEQ ID NO: 4260 - protein, 44 aa, Homo sapiens
PRRGAPEWGACTLSFHTLTLPLHRTPPSSISSLPAAPLPPPGEL

SEQ ID NO: 4261 - protein, 44 aa, Homo sapiens
PRRGAPEWGACTLSFHTLTLPLHRTPPSSPSTPRGTEDCPGRDL

SEQ ID NO: 4262 - protein, 44 aa, Homo sapiens
QESGHGHRPGLPDVHSAAPGAGLGPVDGTGHRPAGARVGSHRAA

SEQ ID NO: 4263 - protein, 44 aa, Homo sapiens
RDRWPPSRPHQPAGITRHCPHPRPTTKNPAEAETTKRQSSLLLQ

SEQ ID NO: 4264 - protein, 44 aa, Homo sapiens
RGSRTEQLPKPGPRRGWGPRWPGRGRGAGGRGGGRRRGPCVRLG

SEQ ID NO: 4265 - protein, 44 aa, Homo sapiens
RVPSPGGSLLGSVAPSLPFLPGWRQETLACRQSCRFEGKDPDST

SEQ ID NO: 4266 - protein, 44 aa, Homo sapiens
YPHSFKFCAAGCHPGSPLGDTPPALCPECPPTWTTYLQCHHGNY

SEQ ID NO: 4267 - protein, 43 aa, Homo sapiens
AMRRPSSRHAAHRPLCQRFPTLTVSRWMTSLISSLRVERSPSP

SEQ ID NO: 4268 - skipped

SEQ ID NO: 4269 - protein, 43 aa, Homo sapiens
AQWLRRTEQRWEWRGPPVSLLFRLAHFLLHQRPAGWPQAEPPQ

SEQ ID NO: 4270 - protein, 43 aa, Homo sapiens
AWSTLWPPAQPHLQPPFCPRARQPLPLPPQPRLALSPAPQQVP

SEQ ID NO: 4271 - protein, 43 aa, Homo sapiens
CCLRTMRSTRGSTGPWGAGAAGAAGAGASPTWGWCTRPSGGTR

SEQ ID NO: 4272 - protein, 43 aa, Homo sapiens
HLSQVKGPVNWKDAQVPRLRFSLPVALDAGKNTLTVKNKPNQL

SEQ ID NO: 4273 - protein, 43 aa, Homo sapiens
KARCPRVGCLHSQLPHPHPTPTSDTPKFNLIPPSSSPSTPRGT

SEQ ID NO: 4274 - protein, 43 aa, Homo sapiens
KGTQVPGAAVTDALQPNQRPGDGGRHAATAGAGPDGGQHPADR

SEQ ID NO: 4275 - protein, 43 aa, Homo sapiens
NLRLHPHPGTLAVHTCMGTRLATCMTTTLNISRHSRYWTQESS

SEQ ID NO: 4276 - skipped

SEQ ID NO: 4277 - protein, 43 aa, Homo sapiens
PGVSGRVCGTAYSVSAPLPAAAATPGLSPRQGHPFPAQQRGLP

SEQ ID NO: 4278 - protein, 43 aa, Homo sapiens
PISSHLHQRPDAGLGHVPVLLEVPEPSSSDTPRLCGPGHPSRL

SEQ ID NO: 4279 - protein, 43 aa, Homo sapiens
PLPPYPAQRTAYCAHISERQLFPRGDPRLPPPVRTRRVQVARL

SEQ ID NO: 4280 - protein, 43 aa, Homo sapiens
PPAPPLLSHPPPPALPLRPPAPSLHEPGAHTPKWGAPGTRFSR

SEQ ID NO: 4281 - skipped

SEQ ID NO: 4282 - protein, 43 aa, Homo sapiens
PWIHWPSTTPTLWLPAGASPSTQTHSPATSSPSRPTSRPSPSV

SEQ ID NO: 4283 - protein, 43 aa, Homo sapiens
QASGGQHSPWRVALAGQCEEARSPHLQRLPGGRHLGPHCCPLL

SEQ ID NO: 4284 - protein, 43 aa, Homo sapiens
RHHLSSSWATSTPSNAGSVRWNSRAPSPSRKSGCGTYSGTSWR

SEQ ID NO: 4285 - protein, 43 aa, Homo sapiens
RLWEDAAGQGGGHGGSGALPGDGRPRVRGGHWRPRRCPCAEPL

SEQ ID NO: 4286 - skipped

SEQ ID NO: 4287 - protein, 43 aa, Homo sapiens
RRWPSAQILHGRVLGSPGAGRWGSPRRRAGTMPSGSRSGSRST

SEQ ID NO: 4288 - protein, 43 aa, Homo sapiens
SSSSSSSNHRCSSLPRRQQPSRHPHHSSHCNSSSNARTKTVRK

SEQ ID NO: 4289 - protein, 43 aa, Homo sapiens
TVSPNSLSTNISTAHIPPLHLRTSARSKFTGLCRPLTSLASTP

SEQ ID NO: 4290 - protein, 43 aa, Homo sapiens
VGKKLWQLCWIMTCLRLFTRNHFAVILLMYQKSPGRLVDGSSW

SEQ ID NO: 4291 - skipped

SEQ ID NO: 4292 - protein, 42 aa, Homo sapiens
AKVKAVMVASLSPTIGLWSSKKYPVRTLLTCIATSPTITSTL

SEQ ID NO: 4293 - protein, 42 aa, Homo sapiens
ALRHHWPASSSCRMQTGAACWHTSTASTTRAGSEKQPRWARR

SEQ ID NO: 4294 - protein, 42 aa, Homo sapiens
AQVLSPQSRPPHLHLGWAQGRALGWLWGEQPSTPRQTWTRCP

SEQ ID NO: 4295 - protein, 42 aa, Homo sapiens
CPRGPPTLLRRQRAARGRVLRLGLCGRASRSWLRRQLCQVCL

SEQ ID NO: 4296 - protein, 42 aa, Homo sapiens
CVTCTPCEPSSSFLGTLRPGSSPRSGLRSSLTSLTHVSSRLT

SEQ ID NO: 4297 - protein, 42 aa, Homo sapiens
DQWCPDGSHLGQPRQLPRDRRPRTSHISALIAARGLCSAAAS

SEQ ID NO: 4298 - protein, 42 aa, Homo sapiens
GCPRSPGPKEASSRALRLHPGLGRGCWLPGRRRPRPWARWGP

SEQ ID NO: 4299 - protein, 42 aa, Homo sapiens
GRRCWTMHPACRWSWTMHPCRRRKPPNPRPSAGTGTAVTPTA

SEQ ID NO: 4300 - protein, 42 aa, Homo sapiens
GSLLGLSLAQPEALKVAARLRCQHPQHHHRRRVQCSLSRVRR

SEQ ID NO: 4301 - protein, 42 aa, Homo sapiens
HAGAQGPGRHRVHCQHRPRQLPGAVSRCLSPCREAPALCGRG

SEQ ID NO: 4302 - protein, 42 aa, Homo sapiens
LSTVTTHWSSGWTLCWALPKRASNWTSRTSRQWAPPWTSCGS

SEQ ID NO: 4303 - protein, 42 aa, Homo sapiens
MDTLALHDPHPMATSGGLSLHPDPLPGHQFPLEAHFEALSLS

SEQ ID NO: 4304 - protein, 42 aa, Homo sapiens
NNIQFNHRGQVLFILDQDLGTSPMLMERLFTQVSRCISQHLS

SEQ ID NO: 4305 - protein, 42 aa, Homo sapiens
PGHGGSQAGAPAGGGAEGGAAAQPAHGLLCAEADLPQQRRRA

SEQ ID NO: 4306 - protein, 42 aa, Homo sapiens
PLQQPGKLTRTRSPPPLCARAGAAAFLAPLPPTPYRPPSVGC

SEQ ID NO: 4307 - protein, 42 aa, Homo sapiens
PLTQGPRLASLPTPLTLSQEALYWMMQRSKMSQTLLLWRWAW

SEQ ID NO: 4308-4309 - skipped (2 entries)

SEQ ID NO: 4310 - protein, 42 aa, Homo sapiens
SASQSSSTRAPPTCGSPPSTANCWTSLAGSTTSTTATSPAPT

SEQ ID NO: 4311 - protein, 42 aa, Homo sapiens
SSSAPARPYSPSECWTPMTMCPLSTNPSTLCPYQRTLPQALS

SEQ ID NO: 4312 - protein, 42 aa, Homo sapiens
SSSPRRLGFPPVSTPKSQVTGQEVHGALRDARPAEFQERLAD

SEQ ID NO: 4313 - protein, 42 aa, Homo sapiens
TPRPAPSIWGMLLVLPKLIMALRPILTLSCWTNQLHEKERTL

SEQ ID NO: 4314 - protein, 42 aa, Homo sapiens
WPALMACRRPGAVVESARQPWSPPPRARWGAPQAPQLQPPSS

SEQ ID NO: 4315 - protein, 41 aa, Homo sapiens
CFGVCCCFTCPPQVSITSCPVTWMDLFSKTSPSESWDPSKP

SEQ ID NO: 4316 - protein, 41 aa, Homo sapiens
PAAAAAAATTGAAASPAASSPAATHTTAPTATAAATQGQRQ

SEQ ID NO: 4317 - skipped

SEQ ID NO: 4318 - protein, 41 aa, Homo sapiens
PGAPGLRTPHPVPGLCPASPPEGGSRPCLSAAQRVQGDDGG

SEQ ID NO: 4319 - protein, 41 aa, Homo sapiens
PGYLRAAPRLLPCVPAQLRTPATPTEALHGGRGGRRGHPRL

SEQ ID NO: 4320 - protein, 41 aa, Homo sapiens
PPCPTTPPPSRGLLGASGLPLFCGHSGFSHPSHSPNPNHQQ

SEQ ID NO: 4321 - skipped

SEQ ID NO: 4322 - protein, 41 aa, Homo sapiens
PSPLTPAPTYPIAPSLAGSGPGHRPVAAGRVLSLRGTARCS

SEQ ID NO: 4323 - protein, 41 aa, Homo sapiens
QAHPQVPALAPQAWWPARRGPLTSAPSAQQSLTKSSSSTTT

SEQ ID NO: 4324 - skipped

SEQ ID NO: 4325 - protein, 41 aa, Homo sapiens
RAVETLRLQLPPRSGPRSPARARGPPPLSAPPPGRCLRRRP

SEQ ID NO: 4326 - protein, 41 aa, Homo sapiens
RSLMRWRKTPAPPAGRPVCTKQRPWASAPSATTSWRPGPRS

SEQ ID NO: 4327 - protein, 41 aa, Homo sapiens
RVFCEVLPERQIHPGRHAGQHSEALGLQQGEVPEDVHWPQE

SEQ ID NO: 4328 - protein, 41 aa, Homo sapiens
SHREGRAQRTEIALASSWDLSPEPVPGAPGASGSGSHPCQV

SEQ ID NO: 4329 - protein, 40 aa, Homo sapiens
ALGGACTGTWGPRGEGPPSSPGSLWPESWGTRRKSPGAPP

SEQ ID NO: 4330 - protein, 40 aa, Homo sapiens
AWASPLSKDSLRSSCPHIRHLSLRDPRPGSLHTSRVSSSS

SEQ ID NO: 4331 - protein, 40 aa, Homo sapiens
HPCQPLWTWSSNGCWARCLGRSSSCRGSPPCCSLWPCPQG

SEQ ID NO: 4332 - protein, 40 aa, Homo sapiens
LPPWPPRPTTTSSPPPNSVQPAGFLFRCRRRCRAVLPTAL

SEQ ID NO: 4333 - protein, 40 aa, Homo sapiens
NSAWHLCHPKPARRSPACQQPGPYCPRPAAAASPPPVPAA

SEQ ID NO: 4334 - protein, 40 aa, Homo sapiens
PCPPETENHRHCQQVPEQAAGARVLYFTFPGGWTQELQFL

SEQ ID NO: 4335 - protein, 40 aa, Homo sapiens
PGPERLQARGSQLWWGGHQCQCQGKGRHRADRRPDTAQEG

SEQ ID NO: 4336 - protein, 40 aa, Homo sapiens
PLPTLTCPTMPGRTPTANPPTPSAASYLWPSRTLQPSACQ

SEQ ID NO: 4337 - protein, 40 aa, Homo sapiens
PQFHPLCHSPTPGHHQQHKPQPSRQPLGYRLVRPEPQHGV

SEQ ID NO: 4338 - protein, 40 aa, Homo sapiens
PSGSGGVGAGPVVVPDGGGEGPQPHPSSSQSPPDLPLKAK

SEQ ID NO: 4339 - protein, 40 aa, Homo sapiens
PTSWCPLSWGQQPHQHSTNSFQDSNRLQFQGFRTASQHLS

SEQ ID NO: 4340 - protein, 40 aa, Homo sapiens
PVCVPRVQGDLLHNDAAASARALTPGAPALPLHPVRQELL

SEQ ID NO: 4341 - protein, 40 aa, Homo sapiens
QAALQRGGQVDGSCRGLPLPAWIPTSTRRQGLPSLPTGAL

SEQ ID NO: 4342 - skipped

SEQ ID NO: 4343 - protein, 40 aa, Homo sapiens
SQVPAWSRSTSWTPMTIALRLLRVHWHWKSKKMLHLVRFS

SEQ ID NO: 4344 - protein, 40 aa, Homo sapiens
SRPRSPASPAHSPTPTSALALPHLPVASCPAPHRSPPRAQ

SEQ ID NO: 4345 - protein, 40 aa, Homo sapiens
TSSPVPVAAASPSPGRVIWMTTVGTALMSLLRVPIPPASP

SEQ ID NO: 4346 - protein, 39 aa, Homo sapiens
GPHPPGRNPASQKEAPRCTSAWESCPPSGRPARQALYRA

SEQ ID NO: 4347 - protein, 39 aa, Homo sapiens
HLLSAPSLSPTHTAVRQVPACVCARLGLQGEEDRGAVIR

SEQ ID NO: 4348 - protein, 39 aa, Homo sapiens
LPRAREPTGCHVSGGYVQGPSANAQLSVGRGPSLSPPNF

SEQ ID NO: 4349 - protein, 39 aa, Homo sapiens
LSPSCDFTSHLWPGDNHRYLGYKHRTWNQFIFKFEHHLP

SEQ ID NO: 4350 - protein, 39 aa, Homo sapiens
MSAGNRKSPTLSTSTGTSSWSQSFILHFSRRLDSRTAVL

SEQ ID NO: 4351 - protein, 39 aa, Homo sapiens
PQPAAVHGLCHPSSVSGARGWAQGGPRPPGAPPSQRLRR

SEQ ID NO: 4352 - protein, 39 aa, Homo sapiens
PRPGQVRAGQPQFQGGLGVPDKILFPLGLRPTGLPFPLP

SEQ ID NO: 4353 - protein, 39 aa, Homo sapiens
PVPGARQGLRVRRLPAAAPPAPQPARASRPAAPAPARGA

SEQ ID NO: 4354 - protein, 39 aa, Homo sapiens
QKAQDFLRISVGSSSRCHAYHPGDCSHHLPGPVLLSPCW

SEQ ID NO: 4355 - protein, 39 aa, Homo sapiens
RDAPVRGGEPHLRVDAEHAGATPDPPARRSHPLHDPALA

SEQ ID NO: 4356 - protein, 39 aa, Homo sapiens
RPPERGTEHLPAPPASRRGEKGASTSPTSACLLHSETNL

SEQ ID NO: 4357 - protein, 39 aa, Homo sapiens
RQPRWVSPHSCAFPDALACGQPRAASELTYTCFPPGCLL

SEQ ID NO: 4358 - protein, 39 aa, Homo sapiens
RTGTVKVGLQGDKGLFRNLALERLLKQLVCPEIGNPFLS

SEQ ID NO: 4359 - protein, 39 aa, Homo sapiens
RWSEMLPWRTSGDTEPRDSEWWPHCSARHPVTSTLPCWK

SEQ ID NO: 4360 - protein, 39 aa, Homo sapiens
SPPTEAASSTARPAKSRTRPTSGWHIGSTTPPRRRPSPR

SEQ ID NO: 4361 - protein, 39 aa, Homo sapiens
VAPPARRAPAATTTTCCTSWSSTRLSFPPFGARNASFPK

SEQ ID NO: 4362 - protein, 38 aa, Homo sapiens
CSWTPPQQRTPVQLSAVAALSPGCPSRWSAYWPQSWCC

SEQ ID NO: 4363 - protein, 38 aa, Homo sapiens
EPSPRWAPPEPTPCRAPTLPRPHSVVPAPRACKSRHGP

SEQ ID NO: 4364 - protein, 38 aa, Homo sapiens
HGGLSGQGGLELGDQLPGAAGGAGPLHGVPVPGLPGSV

SEQ ID NO: 4365 - protein, 38 aa, Homo sapiens
HTSGTLSCCRCRDQSPGCSSLSAPDTGWEETGSRAPAG

SEQ ID NO: 4366 - protein, 38 aa, Homo sapiens
KCCWRMKSHLPHPSPPCRCSCTCSSCRRCSPLRRYSLP

SEQ ID NO: 4367 - protein, 38 aa, Homo sapiens
KISLPKPWSGSKPLCMLWARSYRSQDPSICSSLPRMTS

SEQ ID NO: 4368 - protein, 38 aa, Homo sapiens
LHPETEPAGAPPPRGQAPEDLEARVVPRTPSGDRPLHC

SEQ ID NO: 4369 - protein, 38 aa, Homo sapiens
PATTSTGGIFEPSIRGSVLLLPETKPTLMLELSFMFQM

SEQ ID NO: 4370 - skipped

SEQ ID NO: 4371 - protein, 38 aa, Homo sapiens
PGYECPDAVEPAEARAAVQAGVPDWARPCPHLYHVCGG

SEQ ID NO: 4372 - protein, 38 aa, Homo sapiens
QTPPPKLGQEDLSNIFLTWMIKIPRKRALRRPFLCIWT

SEQ ID NO: 4373 - protein, 38 aa, Homo sapiens
SRCHPQKQEGEGLTQVPQHRTRLGADTRPGRRGPAGAG

SEQ ID NO: 4374 - protein, 37 aa, Homo sapiens
AATSSRRRRRRRHRCPRRRRPRRQIRMTFGCCRQHWV

SEQ ID NO: 4375 - protein, 37 aa, Homo sapiens
ALALLSSSWALPTRWPSRMPTRKMISTISPWYPGWNW

SEQ ID NO: 4376 - protein, 37 aa, Homo sapiens
GSGQDTPVCSGPETSQPSGHPVAPHRSYQKTDPARGR

SEQ ID NO: 4377 - protein, 37 aa, Homo sapiens
IAPLVKTEPQRPVKEEEPKIPGDLDQEPVRAWGWEGD

SEQ ID NO: 4378 - protein, 37 aa, Homo sapiens
ISTWGGLKAGLWGGCGASSQVLRDRPGHGAPEVLPRD

SEQ ID NO: 4379 - skipped

SEQ ID NO: 4380 - protein, 37 aa, Homo sapiens
MASTGSPHTCGDRAHPTSTTMTPAWSPMCPTSISLLG

SEQ ID NO: 4381 - protein, 37 aa, Homo sapiens
NQAAAAESGPAQWWCQTAAERGPSRTPAAVRARQTFL

SEQ ID NO: 4382 - protein, 37 aa, Homo sapiens
PAEPLWCLLTLGPSFSCSHLWPQASALGGSRCAGQMD

SEQ ID NO: 4383 - skipped

SEQ ID NO: 4384 - protein, 37 aa, Homo sapiens
PEPQQHHVNHRRAPGKRLHRQTLQGGRAPSQHSRRRQ

SEQ ID NO: 4385 - protein, 37 aa, Homo sapiens
PGMYPLATPGTLPEAADWQQQPPHTVGEEPLHPQIQD

SEQ ID NO: 4386 - protein, 37 aa, Homo sapiens
PGPRHPLLIVSTQALGWPGLKPRRACQKQSTITNMGT

SEQ ID NO: 4387 - protein, 37 aa, Homo sapiens
PHLCLPLWQPKECDAWQEPPDFCSPGGLPAPHCCQWP

SEQ ID NO: 4388 - protein, 37 aa, Homo sapiens
PLPRHLPGPAGDLPGESWAPWKGAVSIHHKAFPSARH

SEQ ID NO: 4389 - protein, 37 aa, Homo sapiens
PPADGQRFLPCTPLLLPVAWAAQSALRYHGQLPCLPR

SEQ ID NO: 4390 - skipped

SEQ ID NO: 4391 - protein, 37 aa, Homo sapiens
PSTPLRHRTASLPSTPRPHRTPRRTTPARPRSPQSMA

SEQ ID NO: 4392 - protein, 37 aa, Homo sapiens
QPRYEPRTAQGPSAGLSPAASATSGPDPLPPPLPPPL

SEQ ID NO: 4393 - protein, 37 aa, Homo sapiens
RAGSGRRVLRGRVLPLCLGRRRRRGCRLFPLRLSGPV

SEQ ID NO: 4394 - protein, 37 aa, Homo sapiens
RGPRAPDPPPRPGTLPGEPPGRGVPALPQRGPASPRR

SEQ ID NO: 4395 - skipped

SEQ ID NO: 4396 - protein, 37 aa, Homo sapiens
RRPLSRPRQGAAAALPSLPVPAALHLRGAPAQQSQEF

SEQ ID NO: 4397 - protein, 37 aa, Homo sapiens
SIPTPPGFHLQWWSQIPAASVHSPTCLQVNSVLYKPG

SEQ ID NO: 4398 - protein, 37 aa, Homo sapiens
TIPRGVGGQPVAWNHLSGLGPQNHWNPPDQPAPFPPP

SEQ ID NO: 4399 - skipped

SEQ ID NO: 4400 - protein, 37 aa, Homo sapiens
WWAAMASACSLRTASSIPRRWTTSGTQHPQPVPSPKK

SEQ ID NO: 4401 - protein, 36 aa, Homo sapiens
ASIVARESPFGHRAAWEETFTCGIPGYSKEAEDTQM

SEQ ID NO: 4402 - protein, 36 aa, Homo sapiens
HPPGAGPGPGDPGAPARRGAPGVHRVQLRRGPHIDI

SEQ ID NO: 4403 - protein, 36 aa, Homo sapiens
HPVLLPHPGHPLHPLGSPHPGPRALWSSSALWRRPV

SEQ ID NO: 4404 - protein, 36 aa, Homo sapiens
LSRFFRIIPLFHVLFQPRPPCVHRLVGPIYGDTRVF

SEQ ID NO: 4405 - protein, 36 aa, Homo sapiens
PASVVTPAPESLTESCRWLAGRAVSTLSDAMEASTH

SEQ ID NO: 4406 - protein, 36 aa, Homo sapiens
PGTEADAGRTLVPTHPNNAFKSGWEDHGNAAGDRQL

SEQ ID NO: 4407 - protein, 36 aa, Homo sapiens
PPGPPKPGHVYPGGAAAADERAPDREPPAERSHEAK

SEQ ID NO: 4408 - protein, 36 aa, Homo sapiens
PRCPPTLSLRTFQQPTSHPCTCGHQPEASSQASADP

SEQ ID NO: 4409 - protein, 36 aa, Homo sapiens
PRGCARWAGVAAAAGLGACLQPLPGIAAAPWVGAPD

SEQ ID NO: 4410 - protein, 36 aa, Homo sapiens
PRLPCCLQGPTGLIPGLAGRRGVGGRQPVWGAVTRP

SEQ ID NO: 4411 - protein, 36 aa, Homo sapiens
PTAAAAAAAARAPPGPRARAPPAPAPGRGVAPGGGG

SEQ ID NO: 4412 - protein, 36 aa, Homo sapiens
QTLRPWLWLTAWAASTGACGRRQLGANARCSSGMRC

SEQ ID NO: 4413 - protein, 36 aa, Homo sapiens
RPRCLPRCQLWEAVVLILPFLLLIPTWRGCVSPELV

SEQ ID NO: 4414 - protein, 36 aa, Homo sapiens
RSLMRWRKTGRPVCTKQRPWASAPSATTSWRPGPRS

SEQ ID NO: 4415 - protein, 36 aa, Homo sapiens
RVGSCRLGSHAATSVSLTRSRNKETRTGSQERNEGT

SEQ ID NO: 4416 - protein, 36 aa, Homo sapiens
SHFLRSQWKFREQKELPLSLRNGSLLSSRTFRASGR

SEQ ID NO: 4417 - protein, 36 aa, Homo sapiens
SPSHHLPQPGGSAMPRRLTSTWAGVGGCGQPRPRSG

SEQ ID NO: 4418 - protein, 36 aa, Homo sapiens
SRCHPQKQEGEGHEGRCLPPRSWRPLLPRCLRAEPS

SEQ ID NO: 4419 - protein, 36 aa, Homo sapiens
SRSSSLIQSFLQKTHGTCSRRGCTRCTGATIPCTWK

SEQ ID NO: 4420 - skipped

SEQ ID NO: 4421 - protein, 36 aa, Homo sapiens
TRYHCQNPGADQSHCACCGPGATGHRTLQSAAHCQG

SEQ ID NO: 4422 - protein, 36 aa, Homo sapiens
WLTGLPLLYNLCLHLLILQPHCQRVLPLVDLVQGHN

SEQ ID NO: 4423 - protein, 35 aa, Homo sapiens
APTQQLLPPTSTTRTCGRPSTSRSSCHNGTCATFW

SEQ ID NO: 4424 - protein, 35 aa, Homo sapiens
ARPAARSPRLPLRGPAEAPGARRGPAASPTTCCCP

SEQ ID NO: 4425 - protein, 35 aa, Homo sapiens
CLVPTSIQPLMSPLGPLLPLALATSVPGDQVQPLG

SEQ ID NO: 4426 - skipped

SEQ ID NO: 4427 - protein, 35 aa, Homo sapiens
KARCPRVGCLHSQLPHPHPTPTSDTPKLPFHPPGN

SEQ ID NO: 4428 - protein, 35 aa, Homo sapiens
LPRLGRVVPLHPLQTSPVTGDCSRPRPRWMRWWTS

SEQ ID NO: 4429 - protein, 35 aa, Homo sapiens
MPALQPPSVSHWQRATTVTGPWRSCCTPVSPISHT

SEQ ID NO: 4430 - skipped

SEQ ID NO: 4431 - protein, 35 aa, Homo sapiens
PFWAGGRASRGPAAAGGFGAGVWAQPGACLLELGE

SEQ ID NO: 4432 - protein, 35 aa, Homo sapiens
PSGLPSISRHPVLPRPGPLPEPDLLPAGHSLRRWL

SEQ ID NO: 4433 - skipped

SEQ ID NO: 4434 - protein, 35 aa, Homo sapiens
QPSRTSTSTFPVLRRTPAAPPLLRPSPSTSTPTRR

SEQ ID NO: 4435 - protein, 35 aa, Homo sapiens
RGALFLPGGVGFGLCVPLGTTAHPVAPQPVCPRHG

SEQ ID NO: 4436 - skipped

SEQ ID NO: 4437 - protein, 35 aa, Homo sapiens
RRRTPTAMGRNHSCTSRSPSSSWMSSESWRSRTCR

SEQ ID NO: 4438 - protein, 35 aa, Homo sapiens
SGCLRNTGCLSDCGRQSQKALSTQTHSGSHSKRWQ

SEQ ID NO: 4439 - protein, 35 aa, Homo sapiens
SSHRAYTSSPWWRQLDLAHWWAGSGPRTQTWGTTP

SEQ ID NO: 4440 - protein, 35 aa, Homo sapiens
TYADTHEQSANGHLGHHFNRTHFPWCVSSSSSSRK

SEQ ID NO: 4441 - protein, 35 aa, Homo sapiens
WNCSPLSPLSSLSATPLVLCRSWWCRKAGGCRSTQ

SEQ ID NO: 4442 - protein, 34 aa, Homo sapiens
AFRDRNTRILGRVSAPEASHDTVTFRTARKGEKF

SEQ ID NO: 4443 - protein, 34 aa, Homo sapiens
AGHRCPWAWAPWRPRRNRSPESWSRETPPARGRD

SEQ ID NO: 4444 - protein, 34 aa, Homo sapiens
ARMSHRRSWKAPGCRTSSQGGSQEALGKARCLTL

SEQ ID NO: 4445 - skipped

SEQ ID NO: 4446 - protein, 34 aa, Homo sapiens
GHQSPVTCWSMNQWMAQSRKSLWVQIPPPTAWQT

SEQ ID NO: 4447 - protein, 34 aa, Homo sapiens
GWMPRCTWAMSMSLPSGIYGKAHAQKPQQMNASL

SEQ ID NO: 4448 - protein, 34 aa, Homo sapiens
HDRVLLRRHQRHNHLPPAHQCRACRGRLRCLPRA

SEQ ID NO: 4449 - skipped

SEQ ID NO: 4450 - protein, 34 aa, Homo sapiens
LSRSPWRAQALAGAPDHSLTFNLLAPAHHCPVHY

SEQ ID NO: 4451 - protein, 34 aa, Homo sapiens
LSSIQGCFLWKLHLQSHHSRLFAGNQKGITTWIF

SEQ ID NO: 4452 - protein, 34 aa, Homo sapiens
LTRTESPWQDPSPQGQRQGELWGPAWASYSCATP

SEQ ID NO: 4453 - protein, 34 aa, Homo sapiens
PDAGRPGRRRRQGPPAAAAPAAATATTGRRPGRG

SEQ ID NO: 4454 - protein, 34 aa, Homo sapiens
PGPPHQDVLSGPHWLCQLFCPPPGAWALQRGPSP

SEQ ID NO: 4455 - protein, 34 aa, Homo sapiens
PSPPSPSSLLSPCNASIMCPLNPAAQDGARCPSC

SEQ ID NO: 4456 - protein, 34 aa, Homo sapiens
PTTPTPPHGHAGAAWTQGQGVCCLEPWRAGTVQE

SEQ ID NO: 4457 - protein, 34 aa, Homo sapiens
PVSNLSAFSQWKPLDKTVSKRICQLLQRGDSSPR

SEQ ID NO: 4458 - protein, 34 aa, Homo sapiens
QHRRPALGPRAQQAAPKQAGPTNRGDQELAHGRD

SEQ ID NO: 4459 - protein, 34 aa, Homo sapiens
QIPQQAGRPALSAQHTPAPTPPLPRSHLDRGVGV

SEQ ID NO: 4460 - protein, 34 aa, Homo sapiens
RAPQGPRSPSTSGSLRWCWRKSGRASSQTRTHTW

SEQ ID NO: 4461 - skipped

SEQ ID NO: 4462 - protein, 34 aa, Homo sapiens
TSRGSSLQASSWKMAALFLTTTSRKSRPCTWSCA

SEQ ID NO: 4463 - protein, 33 aa, Homo sapiens
AAEPGLACGEGGHQEGQRPSPAGLSPWSPHPET

SEQ ID NO: 4464 - protein, 33 aa, Homo sapiens
ASSPSLLVGANRSSAMGRTGGGCQWWHHFWVPI

SEQ ID NO: 4465 - protein, 33 aa, Homo sapiens
EIRQLSSKSLWRVGPKTRVLNSSKPPLSQIPLR

SEQ ID NO: 4466 - skipped

SEQ ID NO: 4467 - protein, 33 aa, Homo sapiens
GEKVEALCMEEEMVRVTQWPFNWRSRCFGILQK

SEQ ID NO: 4468 - protein, 33 aa, Homo sapiens
GPAKLMRPSFASWGTPSNGTRGWSCSSPLRSSG

SEQ ID NO: 4469 - protein, 33 aa, Homo sapiens
GPESGGQAGAGNPSPGHCQMVQRPEWLRIHQQE

SEQ ID NO: 4470 - protein, 33 aa, Homo sapiens
HAHLPGLWHSGTPRWAPAGVGGLWPGWTAPGHC

SEQ ID NO: 4471 - protein, 33 aa, Homo sapiens
HLHHHQSFLQQKTNMMNTMRIMLKLVLNYQMKG

SEQ ID NO: 4472 - protein, 33 aa, Homo sapiens
HRAAPATVRPGTQAARRPPGVPLAGWARDGGAW

SEQ ID NO: 4473 - protein, 33 aa, Homo sapiens
KASLGAPVRSSARGQDRRKTTLKAPLYPPPLSS

SEQ ID NO: 4474 - protein, 33 aa, Homo sapiens
KPGLHCGHQHNPTCSHHSAQGPASPCHCHPSPD

SEQ ID NO: 4475 - protein, 33 aa, Homo sapiens
LHLGGTPCGGRGLCAALRGRGRQHHTEAQDPVL

SEQ ID NO: 4476 - protein, 33 aa, Homo sapiens
PALPPPGHAQQHGRPRETPQPPHAGNYATRWQL

SEQ ID NO: 4477 - protein, 33 aa, Homo sapiens
PGRCRLTLCPRDSRLSWLTDPIPLPALCPLTRW

SEQ ID NO: 4478 - protein, 33 aa, Homo sapiens
PLPLWDEPPRLCCRQEEEPPMDQAAPSGCGTHL

SEQ ID NO: 4479 - skipped

SEQ ID NO: 4480 - protein, 33 aa, Homo sapiens
QAQRLHHGQVAPGLRGLHRRRLQTADRGKALRH

SEQ ID NO: 4481 - protein, 33 aa, Homo sapiens
QHPLRVAYPGGHRPCNTAQDRSPQHRECGLLPF

SEQ ID NO: 4482 - protein, 33 aa, Homo sapiens
QLRTTCSPSMAGASGRRSPSPASSGENTSPSCR

SEQ ID NO: 4483 - protein, 33 aa, Homo sapiens
REPRSSDPAQPWYLPPEEGSVQRLQGSLGLWPP

SEQ ID NO: 4484 - protein, 33 aa, Homo sapiens
RLQPACADLLPAVSPGTQRLGRRPFSKWTGVAG

SEQ ID NO: 4485 - protein, 33 aa, Homo sapiens
RNGDLYCVPHQGAGGHRDCGPEFWEHPCFRGLW

SEQ ID NO: 4486 - protein, 33 aa, Homo sapiens
RPLPDVPAGPSLAQELQGENDHEDISSAQLGVP

SEQ ID NO: 4487 - protein, 33 aa, Homo sapiens
RSCLPHQLHPWGPSCLLCLGTIVPLPCAPSSPG

SEQ ID NO: 4488 - protein, 33 aa, Homo sapiens
RWRLGLGSGNWSFHFHRLLLCISQINYCLLQRD

SEQ ID NO: 4489 - protein, 33 aa, Homo sapiens
SIPSPLSLPHPRPPPTAQTPALKAATRLSACQA

SEQ ID NO: 4490 - protein, 33 aa, Homo sapiens
WPGTSSGQGVTAMVGGPPMPMPGQREAPGRQEA

SEQ ID NO: 4491 - protein, 32 aa, Homo sapiens
CRHTPRCPRWPPRRGGLHGGDHLRLLRLPSKV

SEQ ID NO: 4492 - skipped

SEQ ID NO: 4493 - protein, 32 aa, Homo sapiens
HPTAEKRAPRRQAYYSSPFSLKTSLAQRGKTV

SEQ ID NO: 4494 - protein, 32 aa, Homo sapiens
HQPTRSLPAVGTGWTTVLFFCFLCYQGANVAV

SEQ ID NO: 4495 - protein, 32 aa, Homo sapiens
LDSRCKAGGGSGLETSSQASGPGGGESSEVPM

SEQ ID NO: 4496 - protein, 32 aa, Homo sapiens
LPGCPTEDHGKHRGAEPPLREGPRRHWGRPGA

SEQ ID NO: 4497 - protein, 32 aa, Homo sapiens
PATPTTLRCHTTPYSPHWATNSLPSCASEGGA

SEQ ID NO: 4498 - protein, 32 aa, Homo sapiens
PAVHQSEGGAVPRARGSRRGSLHLSACGTAPS

SEQ ID NO: 4499 - protein, 32 aa, Homo sapiens
PETLGHRWPAAGPQPAPRVPPPLRGPRVASAA

SEQ ID NO: 4500 - protein, 32 aa, Homo sapiens
PPSPSTPTSPSCTSFALCSEGSPSTCWVYKNP

SEQ ID NO: 4501 - protein, 32 aa, Homo sapiens
PTPRSALAGVWGEKPPGGSHLTNARSTSQTEA

SEQ ID NO: 4502 - protein, 32 aa, Homo sapiens
QGDPQEEEEILFQEAFQIERPVLQEKSEGGWG

SEQ ID NO: 4503-4504 - skipped (2 entries)

SEQ ID NO: 4505 - protein, 32 aa, Homo sapiens
QVLVVRSICHRAAKDRPAGSGSQGCCLPSFHQ

SEQ ID NO: 4506 - protein, 32 aa, Homo sapiens
RDTRLQKKDSSSWQKGTYRPTGNSRHPRTRWT

SEQ ID NO: 4507 - protein, 32 aa, Homo sapiens
RGGPVHTLAAQQGVTPEFRGDGAPGHQRCGDR

SEQ ID NO: 4508 - protein, 32 aa, Homo sapiens
RGRHLLLTAPGAPRGAPAGPVRMGRPTPRAPR

SEQ ID NO: 4509 - protein, 32 aa, Homo sapiens
RNRSRCWENACSHSSKQCIQIWLGRSRECCWR

SEQ ID NO: 4510 - protein, 32 aa, Homo sapiens
RVQKMIGTFLNEHYQGGQLHLSLAVLLLELSP

SEQ ID NO: 4511 - protein, 32 aa, Homo sapiens
SCSHRCLRLPSRHPLPAAGEPPRARAGLGPPA

SEQ ID NO: 4512 - protein, 32 aa, Homo sapiens
SHCQLCSPVARLTWRRPGPKEAISASTRRQLS

SEQ ID NO: 4513 - protein, 32 aa, Homo sapiens
SSVAGPPPVIILAMPSATATATNAFSSSRCMA

SEQ ID NO: 4514 - skipped

SEQ ID NO: 4515 - protein, 31 aa, Homo sapiens
CLLIYLQSLHAPLHSLLRLFKLCQKLSFHHP

SEQ ID NO: 4516 - protein, 31 aa, Homo sapiens
CPLILSHQAPNPVARLKSQISVQIALTFLVP

SEQ ID NO: 4517 - protein, 31 aa, Homo sapiens
EQRREKGLSSPKHGFGIVSTSVTHLVRGHSV

SEQ ID NO: 4518 - protein, 31 aa, Homo sapiens
IHHLPGTIPLSSGARMCLLSQAPPAGSGGRR

SEQ ID NO: 4519 - protein, 31 aa, Homo sapiens
ILRTPLVLAPRGAHRLAPKNPPRARGPREPL

SEQ ID NO: 4520 - protein, 31 aa, Homo sapiens
LPGRKPVCKWRSLHPAALPGGCLPVPAWLGG

SEQ ID NO: 4521 - skipped

SEQ ID NO: 4522 - protein, 31 aa, Homo sapiens
PRTCCHRTPWLCKPVPPWDCGGSEAKGKDLF

SEQ ID NO: 4523 - protein, 31 aa, Homo sapiens
PTHPEPASCGNWMDDSSFLLFPVLPRGQRCC

SEQ ID NO: 4524 - protein, 31 aa, Homo sapiens
QLLQPAAPPPAHALPLLRAQGAGRMCHLHPE

SEQ ID NO: 4525 - protein, 31 aa, Homo sapiens
RGRTWQQTWGSRHSSWTKISRESHPAQGKAG

SEQ ID NO: 4526 - protein, 31 aa, Homo sapiens
RHVPVQPVRVSADRPADTPAPSPSKDLLSHP

SEQ ID NO: 4527 - protein, 31 aa, Homo sapiens
RRRRSAAALAAAAELARPRLLVGWCESATCS

SEQ ID NO: 4528 - protein, 31 aa, Homo sapiens
RTAGTAAATLPPASWLRGPSVRTVPAARSAR

SEQ ID NO: 4529 - protein, 31 aa, Homo sapiens
SIFSTWIIPANVWMLMTALSYPWALMNSWPL

SEQ ID NO: 4530 - protein, 31 aa, Homo sapiens
SQDLLQKVTLPPHHHQCQPWSPTLPRTPLLP

SEQ ID NO: 4531 - protein, 31 aa, Homo sapiens
VKPNMPFIVSMRYFLVKRPSLHRYLSLCIRA

SEQ ID NO: 4532 - protein, 31 aa, Homo sapiens
WKATQPWGLPGWPPAHGLVLLAHASQHSTWP

SEQ ID NO: 4533 - protein, 30 aa, Homo sapiens
AATRSLPCPGGRTVQDSRKRKEGSRSVEGS

SEQ ID NO: 4534 - protein, 30 aa, Homo sapiens
EKGLRGRSWDPESYVTVRGRASRQERAPVW

SEQ ID NO: 4535 - protein, 30 aa, Homo sapiens
GGCPTTSQLPTYSQGLPANTSHGQVRQDPV

SEQ ID NO: 4536 - protein, 30 aa, Homo sapiens
GPWQSWPSWPGSWAADIKVPYRRTSSHPQT

SEQ ID NO: 4537 - protein, 30 aa, Homo sapiens
GTLSRASTTPHALCQQRLRPFLHADHRAGC

SEQ ID NO: 4538 - protein, 30 aa, Homo sapiens
IAALSLMNYILGLSRTSSLKLPKSQNLKSA

SEQ ID NO: 4539 - protein, 30 aa, Homo sapiens
LHLGWAQGRALGWLWGEQPSTPRQTWTRCP

SEQ ID NO: 4540 - protein, 30 aa, Homo sapiens
LPEPPSPGPLQPKRKPQWPEQPQSRSREHQ

SEQ ID NO: 4541 - protein, 30 aa, Homo sapiens
LTRPWSSRHSASCHRNSLSPSQFSPAWALS

SEQ ID NO: 4542 - protein, 30 aa, Homo sapiens
NPFPNLARPGGASPMERLSVQETLLPQPPK

SEQ ID NO: 4543 - protein, 30 aa, Homo sapiens
PDSCSRGGSSLLLGAPNPIPAWTPERVCQQ

SEQ ID NO: 4544 - protein, 30 aa, Homo sapiens
PEASPSHPGSSEKPQPVPPPRAPLVPQPKP

SEQ ID NO: 4545 - skipped

SEQ ID NO: 4546 - protein, 30 aa, Homo sapiens
PRWGPRVAAELGSHEGGAEGQHHGRHRGPA

SEQ ID NO: 4547 - protein, 30 aa, Homo sapiens
PTSGAPTAAISGSHGSYPGTEGPGQAIYLH

SEQ ID NO: 4548 - protein, 30 aa, Homo sapiens
QLSGWPGGDTHAGLLHPGRPLPHGHPARGQ

SEQ ID NO: 4549 - protein, 30 aa, Homo sapiens
QQRGLQPPGCGRCPDGSAQPRAQVQTSLLL

SEQ ID NO: 4550 - protein, 30 aa, Homo sapiens
QVRAGAPTGAGAGGDSPSRQQWRERPPPDR

SEQ ID NO: 4551 - protein, 30 aa, Homo sapiens
RRWCGRARAAGARARASAPSWLTRMARKWP

SEQ ID NO: 4552 - protein, 30 aa, Homo sapiens
RSHLTSAVPSASIRPLIWTPCRYMSWSALS

SEQ ID NO: 4553 - protein, 30 aa, Homo sapiens
SAGVLRGSKRTGPACMPTKRRTVMKSTWRS

SEQ ID NO: 4554 - protein, 30 aa, Homo sapiens
SPLHPHPGEKWREGHRAPSSTGFSVSLRPL

SEQ ID NO: 4555 - protein, 30 aa, Homo sapiens
SPSSLLSPCNASIMCPLNPAAQDGARCPSC

SEQ ID NO: 4556 - protein, 30 aa, Homo sapiens
SSSASSASAATSPLRRDCLSRGAREVLRIR

SEQ ID NO: 4557 - protein, 30 aa, Homo sapiens
SSSRSPTPRPSGPRSSASSPCIPISTPSTT

SEQ ID NO: 4558 - skipped

SEQ ID NO: 4559 - protein, 30 aa, Homo sapiens
VPAPSSAGSVRKTPHPLRDPSAACQTSQGV

SEQ ID NO: 4560 - protein, 30 aa, Homo sapiens
WWRRVCAQLLPCRLPLRASPLPGAPSQVPI

SEQ ID NO: 4561 - protein, 30 aa, Homo sapiens
YSCPPGSTEVGKIPEKQRCPQPLTRSRYGE

SEQ ID NO: 4562 - protein, 29 aa, Homo sapiens
DKSPSSPLPLVPLDSRPYSPFPGQSNGIS

SEQ ID NO: 4563 - protein, 29 aa, Homo sapiens
GLTMSPLWPSCPWTGCRCWKPCAGTGLAP

SEQ ID NO: 4564 - protein, 29 aa, Homo sapiens
GTSYTSQAWGHQWRWWTWGGLRTGPCAKP

SEQ ID NO: 4565 - skipped

SEQ ID NO: 4566 - protein, 29 aa, Homo sapiens
MSVLSVGATSCKPIFRPISGRPVCTSLAV

SEQ ID NO: 4567 - protein, 29 aa, Homo sapiens
PAAAPRGPATAGTGAAGTGQRGPAHFIRL

SEQ ID NO: 4568 - protein, 29 aa, Homo sapiens
PAPIPWSSPITNLTTTPGADGCEPGGRPC

SEQ ID NO: 4569 - protein, 29 aa, Homo sapiens
PEPLGSSEGPGHCVRGCAQRQRQRLCVPV

SEQ ID NO: 4570 - protein, 29 aa, Homo sapiens
PPTPTPPTLSTRRCPRPACCLSSAPAAPP

SEQ ID NO: 4571-4573 - skipped (3 entries)

SEQ ID NO: 4574 - protein, 29 aa, Homo sapiens
STAPLCPGVPVSSTEGGRKATQLSTNACH

SEQ ID NO: 4575 - protein, 29 aa, Homo sapiens
TDGLLYLCSSEMLFPRPVVRRRGCVQWGW

SEQ ID NO: 4576 - protein, 29 aa, Homo sapiens
TDPGPAAGGGLLHPGPGWLQDLCVAGTHV

SEQ ID NO: 4577 - protein, 29 aa, Homo sapiens
TPSRWTARTQMMWYQLAKEEPGVGACALD

SEQ ID NO: 4578 - protein, 28 aa, Homo sapiens
AACWAAPPPASDASPGPRPGPAQKAGSV

SEQ ID NO: 4579 - protein, 28 aa, Homo sapiens
ATACGCGAGHPGRERELQPRGAQECPTA

SEQ ID NO: 4580 - protein, 28 aa, Homo sapiens
AVLLPKCRVSSGAAGTRNRTKSQVRRQP

SEQ ID NO: 4581 - protein, 28 aa, Homo sapiens
CHLASCPQCFHQWGRHHHSHRYQEWYLR

SEQ ID NO: 4582 - protein, 28 aa, Homo sapiens
FPLQLRLVVSSNQVSGDLSSCYPKRNPL

SEQ ID NO: 4583 - protein, 28 aa, Homo sapiens
HGGCREEEVRGPAGGDPRGALLHRAPRG

SEQ ID NO: 4584 - protein, 28 aa, Homo sapiens
KPSHPCPHLPHRPQPGRLGAWAPPGCSW

SEQ ID NO: 4585 - protein, 28 aa, Homo sapiens
LLSQTPRLPPCLHTEEPSHWTGGPRSPP

SEQ ID NO: 4586 - protein, 28 aa, Homo sapiens
LRLHCQHSSLQGHEKEPLLTKSWGALVY

SEQ ID NO: 4587 - skipped

SEQ ID NO: 4588 - protein, 28 aa, Homo sapiens
PGGPRASGFQLSRPVRSRICCRLPATDE

SEQ ID NO: 4589 - protein, 28 aa, Homo sapiens
PGPEGGLPSGNPWSDPQDCRGRHWRCLR

SEQ ID NO: 4590 - protein, 28 aa, Homo sapiens
PMPPPPRRPLPPPPRAAQRTVTRGKRLN

SEQ ID NO: 4591 - protein, 28 aa, Homo sapiens
PRPSPLLQRWKRLGRSSVRPSSSSTCTG

SEQ ID NO: 4592 - protein, 28 aa, Homo sapiens
PRRGAPEWGACTLSFHTLTLPLHRTPPR

SEQ ID NO: 4593 - protein, 28 aa, Homo sapiens
QDHTSRTWSTQYASTWDSSGEWDGHPPG

SEQ ID NO: 4594 - skipped

SEQ ID NO: 4595 - protein, 28 aa, Homo sapiens
RKAWAPPPCTRSPASRSSDRCPWSPTRP

SEQ ID NO: 4596 - protein, 28 aa, Homo sapiens
RNSRAPRLARRQRRQGLPREDRAPRQSG

SEQ ID NO: 4597 - protein, 28 aa, Homo sapiens
RRTSWPSALAYLKVQTPQKRNSSQNQNT

SEQ ID NO: 4598 - skipped

SEQ ID NO: 4599 - protein, 28 aa, Homo sapiens
SLLRISALLPQTLQLSSSALELTCPSLP

SEQ ID NO: 4600 - protein, 28 aa, Homo sapiens
SSSPPWPSNRRHRGRRHRAARPSSFHST

SEQ ID NO: 4601 - protein, 28 aa, Homo sapiens
STAARPARVLSCRLSSAVWLPARWKASG

SEQ ID NO: 4602 - protein, 28 aa, Homo sapiens
TDAPSGPGLPAPEEPITVSGPTVSQGPI

SEQ ID NO: 4603 - protein, 28 aa, Homo sapiens
TPVLPQGCSLSLLHTTFPHRQVPHILDW

SEQ ID NO: 4604 - protein, 28 aa, Homo sapiens
VWRHLRRSWRNSLGCSTMEGRRKPWSGP

SEQ ID NO: 4605 - protein, 28 aa, Homo sapiens
WHTPHLRTRQAMVTNPSHQALAGGRGPP

SEQ ID NO: 4606 - protein, 28 aa, Homo sapiens
YAASPLPIAAPARAPLGPVGWHVRTAPH

SEQ ID NO: 4607 - protein, 27 aa, Homo sapiens
AACWAAPPPASDASPGPRPGPAQAGSV

SEQ ID NO: 4608 - protein, 27 aa, Homo sapiens
AGSTGASRPLRTRRTRSQCRRSWSPAR

SEQ ID NO: 4609 - protein, 27 aa, Homo sapiens
GALLPGSPLSFSFPHWEPLDLRTSVPG

SEQ ID NO: 4610 - protein, 27 aa, Homo sapiens
HRQLQHPGLRQVQRDLRSGLPARAHGV

SEQ ID NO: 4611 - protein, 27 aa, Homo sapiens
LLPSTLTPGRSGERATEPPAAPAFPCP

SEQ ID NO: 4612 - protein, 27 aa, Homo sapiens
PAAGVPGTSPAWHWHCGETNQAPGQLL

SEQ ID NO: 4613 - protein, 27 aa, Homo sapiens
PALQLHDSAVLFEQRHWWGRDCFPCSR

SEQ ID NO: 4614 - protein, 27 aa, Homo sapiens
PAPHRRKWKRRRRSGTSTTRCSWTWSM

SEQ ID NO: 4615 - protein, 27 aa, Homo sapiens
PAPHRRNPESRSAGRPGPPQSSPACLC

SEQ ID NO: 4616 - protein, 27 aa, Homo sapiens
PPWEQHSHPGQSRDLRAIPTESCSSPE

SEQ ID NO: 4617 - protein, 27 aa, Homo sapiens
QREWRCLLCGPAWTCFQKGLLHVRKQL

SEQ ID NO: 4618 - protein, 27 aa, Homo sapiens
RMEEGGSDPKIWAKCWQERCLLLQSKW

SEQ ID NO: 4619 - protein, 27 aa, Homo sapiens
RPPGACWALLSVGSSPPMLAEASTQTS

SEQ ID NO: 4620 - protein, 27 aa, Homo sapiens
RPWHEPRAAGLLRFSFLCTAWSPGLWT

SEQ ID NO: 4621 - protein, 27 aa, Homo sapiens
TSPATRFYRTWPLPGPHAWTSTPRTPT

SEQ ID NO: 4622 - protein, 27 aa, Homo sapiens
WAVPTSSLAKPWGFKCPTQLDSATQGG

SEQ ID NO: 4623 - protein, 27 aa, Homo sapiens
WHTGIHYVTTRFHPICGIKEKRVPLSC

SEQ ID NO: 4624 - protein, 27 aa, Homo sapiens
WREAWRRSSWPRWTMAWAQHGSPAIGG

SEQ ID NO: 4625 - protein, 26 aa, Homo sapiens
ECDRVYLNYPPFNGGHSAAQPASGPE

SEQ ID NO: 4626 - protein, 26 aa, Homo sapiens
GSSGPWAWFGSPRQPRGGGGAGTGRG

SEQ ID NO: 4627 - protein, 26 aa, Homo sapiens
HTGAGTLRFAIPRPFTPRTGRLLRRS

SEQ ID NO: 4628 - protein, 26 aa, Homo sapiens
LWCCIVFSGSGPSGMRICCGPRCWKP

SEQ ID NO: 4629 - protein, 26 aa, Homo sapiens
PACHRVAALWIPASHLHPVRPLLSPN

SEQ ID NO: 4630 - protein, 26 aa, Homo sapiens
PASRRGEKGASTSPTSACLLHSETNL

SEQ ID NO: 4631 - protein, 26 aa, Homo sapiens
PAVPAARPAQLTAQLQRQLWPCPISQ

SEQ ID NO: 4632 - protein, 26 aa, Homo sapiens
PGPLKIRASASRGDTAVREASSLLKS

SEQ ID NO: 4633 - protein, 26 aa, Homo sapiens
PGSWLPTPRQHELSQPTLQPASGSKL

SEQ ID NO: 4634 - protein, 26 aa, Homo sapiens
PWWGPVRDGLCAQGRKPHPPGHGLLH

SEQ ID NO: 4635 - protein, 26 aa, Homo sapiens
RNLLHLAPASPGGPESPAGLLPGAAS

SEQ ID NO: 4636 - protein, 26 aa, Homo sapiens
RPPRSPGPAPLGDPRAAPPGSSGSFW

SEQ ID NO: 4637 - protein, 26 aa, Homo sapiens
RRPPKPDQALPRPLGDLMVQPQLRPR

SEQ ID NO: 4638 - protein, 26 aa, Homo sapiens
SGLSRAFTWPCCGSPASTSPSSSASP

SEQ ID NO: 4639 - protein, 26 aa, Homo sapiens
SHNPHPLQLPSPYRATHPSSRPPHSL

SEQ ID NO: 4640 - protein, 26 aa, Homo sapiens
TAPDAQAAQLPVVREDLLLGQRPADP

SEQ ID NO: 4641 - skipped

SEQ ID NO: 4642 - protein, 26 aa, Homo sapiens
VVLRLGNLPPFFRGSEVPFPRPCRTK

SEQ ID NO: 4643 - protein, 26 aa, Homo sapiens
WQTSTLALITSNIRENVLWDFWDHGG

SEQ ID NO: 4644 - protein, 25 aa, Homo sapiens
ASRWNPLRRTRALRGPPRQRAAAPH

SEQ ID NO: 4645 - protein, 25 aa, Homo sapiens
CASPEKPLNAFCRLHYQHPPPPLPR

SEQ ID NO: 4646 - protein, 25 aa, Homo sapiens
CHHPATGHHTAPRPASIAGLRTNRI

SEQ ID NO: 4647 - protein, 25 aa, Homo sapiens
EGLHSDLPWVTQVLCLRMVCVDLLH

SEQ ID NO: 4648 - protein, 25 aa, Homo sapiens
KTGVSQAPQASCPTSTPTPRPGYPP

SEQ ID NO: 4649 - protein, 25 aa, Homo sapiens
LGSLTQRHHQPEWYNLTESPARLSA

SEQ ID NO: 4650 - protein, 25 aa, Homo sapiens
LLSCPATRGSRLPILMVHTSSHQRG

SEQ ID NO: 4651 - protein, 25 aa, Homo sapiens
LLTSSFCAPRTQQLHALHWNRRVFL

SEQ ID NO: 4652 - protein, 25 aa, Homo sapiens
LLVSNHQGEQRLCLPSDPGWMAGDC

SEQ ID NO: 4653 - protein, 25 aa, Homo sapiens
LTPAAPLPWWLEGHHREATGRPRGG

SEQ ID NO: 4654 - protein, 25 aa, Homo sapiens
PAAPLGPQPCPQSLSQRLQSRRPPP

SEQ ID NO: 4655 - protein, 25 aa, Homo sapiens
PAARRPYPEALADGARLARLFLRVL

SEQ ID NO: 4656 - protein, 25 aa, Homo sapiens
PGACSAPQRGGAEVVCGERGGDSLC

SEQ ID NO: 4657 - protein, 25 aa, Homo sapiens
PPWSRALRASPWPWPRSPTPWSTSL

SEQ ID NO: 4658 - protein, 25 aa, Homo sapiens
PRPPCSPAPPRTRPCLTPWCTRRSR

SEQ ID NO: 4659 - protein, 25 aa, Homo sapiens
PTSASTPILEPWLYTRVWVRVWPHA

SEQ ID NO: 4660 - protein, 25 aa, Homo sapiens
QLSVVSPWPPLFLGPHQHPEGFPGI

SEQ ID NO: 4661 - protein, 25 aa, Homo sapiens
QPSLGPPRLRMVRRWTAMTRMMPPP

SEQ ID NO: 4662 - protein, 25 aa, Homo sapiens
QSPHHAGRPQSPHHAGHLRSLDHTQ

SEQ ID NO: 4663 - protein, 25 aa, Homo sapiens
RLPPLPAAAAAAATAAPAAAAPAAR

SEQ ID NO: 4664 - skipped

SEQ ID NO: 4665 - protein, 25 aa, Homo sapiens
RRGRQRRLQKHLLRHHARRRQGPGV

SEQ ID NO: 4666 - protein, 25 aa, Homo sapiens
RYHVRIFLVSQGLNHLNLTKMKSTF

SEQ ID NO: 4667 - protein, 25 aa, Homo sapiens
SKLTEIEMQYLKFKQKRNPLDFLFL

SEQ ID NO: 4668 - protein, 25 aa, Homo sapiens
SPQKHLRICTSLGLWLIKPSSMQVG

SEQ ID NO: 4669 - protein, 24 aa, Homo sapiens
GPAGPPPPLRRRRRPARPPHPRAT

SEQ ID NO: 4670 - protein, 24 aa, Homo sapiens
IPYQMWLKCSGRSCRLTDRLFVDG

SEQ ID NO: 4671 - protein, 24 aa, Homo sapiens
KQPPPHPNLADWRSNRKLTHSGWV

SEQ ID NO: 4672 - protein, 24 aa, Homo sapiens
KQYCCQSAECHQAPPAPETGRRAK

SEQ ID NO: 4673 - protein, 24 aa, Homo sapiens
LLKLTWIMWSLKSTDTCRRSSGAG

SEQ ID NO: 4674 - protein, 24 aa, Homo sapiens
MTPGPGAGPAACSSCAPALCAAAA

SEQ ID NO: 4675 - protein, 24 aa, Homo sapiens
PAICAPGQNALQELLLEDLLLLQI

SEQ ID NO: 4676 - skipped

SEQ ID NO: 4677 - protein, 24 aa, Homo sapiens
PNPAPAQPGTTGHDREARRCPATV

SEQ ID NO: 4678 - protein, 24 aa, Homo sapiens
PPGDLHRCARSRGPEADSEERRST

SEQ ID NO: 4679 - protein, 24 aa, Homo sapiens
PPPSHRAPHSPPPSQHRRAQDQPH

SEQ ID NO: 4680 - protein, 24 aa, Homo sapiens
PQSPRGKSSRQACCTWWGTTSGRP

SEQ ID NO: 4681 - protein, 24 aa, Homo sapiens
PVWGAERSQHSHGAGQAPAALPLL

SEQ ID NO: 4682 - protein, 24 aa, Homo sapiens
QHWHCCHPRGHFRRGGHQGCPRER

SEQ ID NO: 4683 - protein, 24 aa, Homo sapiens
RGSFPRQRPCQRIPQTRRTEKHPP

SEQ ID NO: 4684 - protein, 24 aa, Homo sapiens
RPPERGTEHLPAPPASRRGEKTNL

SEQ ID NO: 4685 - protein, 24 aa, Homo sapiens
RPPWSSWLRQTWFGWASWGPRRQG

SEQ ID NO: 4686 - protein, 24 aa, Homo sapiens
SLPATSEGSHTQPPLSPPMGCKSL

SEQ ID NO: 4687 - protein, 24 aa, Homo sapiens
SSTPSSWTSRSWTTRSPSTPTANC

SEQ ID NO: 4688 - protein, 24 aa, Homo sapiens
TLILTDFATWSQQTISGMQGTSKQ

SEQ ID NO: 4689 - protein, 24 aa, Homo sapiens
TMVQGPAGLPLAMAQVTHPLVHIT

SEQ ID NO: 4690 - protein, 24 aa, Homo sapiens
TPTACGISRWPQTMQYSSRSKPSA

SEQ ID NO: 4691 - protein, 24 aa, Homo sapiens
TWAATSTTKTSATSSRTATPRTRS

SEQ ID NO: 4692 - protein, 24 aa, Homo sapiens
VSVYSGNLLSFSRRGMKSSVRLKN

SEQ ID NO: 4693 - protein, 23 aa, Homo sapiens
ASAPTSPLPSSPPSSPQFQIRTT

SEQ ID NO: 4694 - protein, 23 aa, Homo sapiens
ATPLRGAETPKAASSVSARTPTS

SEQ ID NO: 4695 - protein, 23 aa, Homo sapiens
FLHGMLAKFRQPPLLTPCGRQTL

SEQ ID NO: 4696 - protein, 23 aa, Homo sapiens
GNLSPWLSRSPRPRWSLWAWRCS

SEQ ID NO: 4697 - protein, 23 aa, Homo sapiens
GTWTPGPSSPLETETLRWRLMTW

SEQ ID NO: 4698 - protein, 23 aa, Homo sapiens
HLSNISRPHPHHSGHGTCCAEEE

SEQ ID NO: 4699 - protein, 23 aa, Homo sapiens
HPLQSLHHPPCSLSAATQAIPPR

SEQ ID NO: 4700 - protein, 23 aa, Homo sapiens
HTIQHASVPTASCISKLNSYTET

SEQ ID NO: 4701 - protein, 23 aa, Homo sapiens
HWRRGVPYSLQDSGDAHCPRVLT

SEQ ID NO: 4702 - protein, 23 aa, Homo sapiens
IFPFLWALILHLYIRVLLVLSNF

SEQ ID NO: 4703 - protein, 23 aa, Homo sapiens
KSPHSWKTSGPCSLPLDRTFLQC

SEQ ID NO: 4704 - protein, 23 aa, Homo sapiens
LQGASQRPGQEGQVYPADGHCSR

SEQ ID NO: 4705 - protein, 23 aa, Homo sapiens
MPTGLRKARMEGQPMRCLHLPPS

SEQ ID NO: 4706 - protein, 23 aa, Homo sapiens
NHPDPSARACWSCVDTRPRCLLP

SEQ ID NO: 4707 - protein, 23 aa, Homo sapiens
NQKIRSSSRPGGAEKEPIFQKQA

SEQ ID NO: 4708 - protein, 23 aa, Homo sapiens
PELPPPVGGHSSATFEPWTPGQL

SEQ ID NO: 4709 - protein, 23 aa, Homo sapiens
PGRQERLRGPPSLSFCHRSDRNR

SEQ ID NO: 4710 - protein, 23 aa, Homo sapiens
PPRPRRRPPRRPPRLWAPTTQAA

SEQ ID NO: 4711 - protein, 23 aa, Homo sapiens
PRNPSLIAHGTRHPHQLPHRSQQ

SEQ ID NO: 4712 - skipped

SEQ ID NO: 4713 - protein, 23 aa, Homo sapiens
PSRHTHIERTGLRRCPTAVFMAA

SEQ ID NO: 4714 - protein, 23 aa, Homo sapiens
RAGVGDHAQKATPQWGALILLGF

SEQ ID NO: 4715 - protein, 23 aa, Homo sapiens
REPWPAIDGDRHRLGAGSAAVPH

SEQ ID NO: 4716 - protein, 23 aa, Homo sapiens
RLLARRTAGGQCTMNWRSAGGPS

SEQ ID NO: 4717 - protein, 23 aa, Homo sapiens
RRRQRLWTRAEPQRARVPPLPTL

SEQ ID NO: 4718 - protein, 23 aa, Homo sapiens
RSYRFSLTLEAVTLPWQEPRTPT

SEQ ID NO: 4719 - protein, 23 aa, Homo sapiens
RYSSWSRTSPASLSWKSQTSTSS

SEQ ID NO: 4720 - protein, 23 aa, Homo sapiens
SNLRAGTECPAGTSSGRPSPPAN

SEQ ID NO: 4721 - protein, 23 aa, Homo sapiens
SPTTPTPAADYGERRVPKHRRPL

SEQ ID NO: 4722 - protein, 23 aa, Homo sapiens
TRCLPATVEPRRPGKRRAGCGRW

SEQ ID NO: 4723 - protein, 23 aa, Homo sapiens
TRVHVSSPPSSATLLCWENGSRV

SEQ ID NO: 4724 - protein, 23 aa, Homo sapiens
TTTNVSPGPRHSPGHPSCHEECH

SEQ ID NO: 4725 - protein, 23 aa, Homo sapiens
TWKSCTLRPRRGSAPYNTKRNRN

SEQ ID NO: 4726 - protein, 23 aa, Homo sapiens
YVSSSSQGLEWLRVKMASWACRS

SEQ ID NO: 4727 - protein, 22 aa, Homo sapiens
ASTSGRTRRSAKMSTNACPARV

SEQ ID NO: 4728 - protein, 22 aa, Homo sapiens
GATSASGWSFLRHFRALDPRPA

SEQ ID NO: 4729 - protein, 22 aa, Homo sapiens
GGAAFPISFIPGAHPASSAWGR

SEQ ID NO: 4730 - protein, 22 aa, Homo sapiens
GLRFALSPGTARHLRRVPPPLP

SEQ ID NO: 4731 - protein, 22 aa, Homo sapiens
GRVVHVPAAHPQLLAGAGGQRL

SEQ ID NO: 4732 - skipped

SEQ ID NO: 4733 - protein, 22 aa, Homo sapiens
HLSQVKGPVNWKDAQVPRLRFN

SEQ ID NO: 4734 - protein, 22 aa, Homo sapiens
HPQWNHIPQIRRLQRLLAGQGD

SEQ ID NO: 4735 - protein, 22 aa, Homo sapiens
LDAGVEGPEQLGHGRELPHRPG

SEQ ID NO: 4736 - protein, 22 aa, Homo sapiens
LGGQRMPAAHHQESPVRSPESG

SEQ ID NO: 4737 - protein, 22 aa, Homo sapiens
LPCPRLRHPPSCLPALQAGPAD

SEQ ID NO: 4738 - protein, 22 aa, Homo sapiens
NLLVSTQLGTAASPTQHQQLPR

SEQ ID NO: 4739 - protein, 22 aa, Homo sapiens
NSQILTSHLNIQIKIAVWSTLP

SEQ ID NO: 4740 - protein, 22 aa, Homo sapiens
PAAAALDEGRTTTCKGSTPTDA

SEQ ID NO: 4741 - protein, 22 aa, Homo sapiens
PAGCLRQRRLSKGCWRWSCGAL

SEQ ID NO: 4742 - protein, 22 aa, Homo sapiens
PALCPECPPTWTTYLQCHHGNY

SEQ ID NO: 4743 - protein, 22 aa, Homo sapiens
PEATPAQQQGVRPEEPRVLQQA

SEQ ID NO: 4744 - protein, 22 aa, Homo sapiens
PGTAEHCAHRLWAEFHFSTSRG

SEQ ID NO: 4745 - skipped

SEQ ID NO: 4746 - protein, 22 aa, Homo sapiens
PHPRGSPAWSRGAARPRPLRML

SEQ ID NO: 4747 - protein, 22 aa, Homo sapiens
PPQAALVGGRLEGHSGQQAALL

SEQ ID NO: 4748 - protein, 22 aa, Homo sapiens
QAAVAPASAPAPTEAARPPTPR

SEQ ID NO: 4749 - protein, 22 aa, Homo sapiens
QKPPWEHQSEVQHGDKIGEKPL

SEQ ID NO: 4750 - protein, 22 aa, Homo sapiens
QNREEKKDFLPRNMDLALSQHQ

SEQ ID NO: 4751 - protein, 22 aa, Homo sapiens
QPWRPHAGPAVQPPEPASGLPW

SEQ ID NO: 4752 - protein, 22 aa, Homo sapiens
QVREPHVHVLPGHVLHRLPHSV

SEQ ID NO: 4753 - protein, 22 aa, Homo sapiens
RGFTDRFSKTGRSAEPHSGRDT

SEQ ID NO: 4754 - protein, 22 aa, Homo sapiens
RRSWWRVPTPPSSTLTSGPTPL

SEQ ID NO: 4755 - protein, 22 aa, Homo sapiens
RTPGTCGLRVGAGRIRPERAGT

SEQ ID NO: 4756 - protein, 22 aa, Homo sapiens
SDCCPTKSQVPPLPVTPPYTSS

SEQ ID NO: 4757 - protein, 22 aa, Homo sapiens
TGRRRRSYPRSPSPGITTCVMR

SEQ ID NO: 4758 - protein, 21 aa, Homo sapiens
AAGCTRGRTTGRPFWTASGPA

SEQ ID NO: 4759 - protein, 21 aa, Homo sapiens
ARAIATRPGGWNRMGEPRGFC

SEQ ID NO: 4760 - protein, 21 aa, Homo sapiens
ARGTSPIRHCSHSSSCSGPSS

SEQ ID NO: 4761 - protein, 21 aa, Homo sapiens
CPQWPGQRRLSAGSGVLTAGC

SEQ ID NO: 4762 - protein, 21 aa, Homo sapiens
CQCRHLHAGPFPLLPELHSEL

SEQ ID NO: 4763 - protein, 21 aa, Homo sapiens
FVQLHRHPPPFLQARQPAQSQ

SEQ ID NO: 4764 - protein, 21 aa, Homo sapiens
HRAQRGDRGVSDPVQQQPHAA

SEQ ID NO: 4765 - protein, 21 aa, Homo sapiens
NDCPGENPPRKIPSTSLQPEH

SEQ ID NO: 4766 - protein, 21 aa, Homo sapiens
NTPQQRKGHPDVRLTTAAPSL

SEQ ID NO: 4767 - protein, 21 aa, Homo sapiens
PAPPTPPRPGGTSGGGGHGGD

SEQ ID NO: 4768 - protein, 21 aa, Homo sapiens
PEEGSPPQLRQWWAQGADPLA

SEQ ID NO: 4769 - protein, 21 aa, Homo sapiens
PKCRVPAPLLTWLEPCTPVPR

SEQ ID NO: 4770 - protein, 21 aa, Homo sapiens
PWLQRAAPTHAATGPTPHQPR

SEQ ID NO: 4771 - protein, 21 aa, Homo sapiens
QGRGFPGGPCGAVSNRRDCRG

SEQ ID NO: 4772 - protein, 21 aa, Homo sapiens
QPACLSSAPSTLRIVTGPSTT

SEQ ID NO: 4773 - protein, 21 aa, Homo sapiens
QPGRCVSLSGHFHNVSKQATL

SEQ ID NO: 4774 - protein, 21 aa, Homo sapiens
RGAGTSFSQPPGHQEARQLGQ

SEQ ID NO: 4775 - protein, 21 aa, Homo sapiens
RPKEVAETLSFRIPGTQRQYL

SEQ ID NO: 4776 - protein, 21 aa, Homo sapiens
RTFICPQGTRNEQRQREIQWV

SEQ ID NO: 4777 - skipped

SEQ ID NO: 4778 - protein, 21 aa, Homo sapiens
SRLSPPEAAFQRMLAMELRSP

SEQ ID NO: 4779 - protein, 21 aa, Homo sapiens
VDRPQHTEWLSWSNLYRIRHQ

SEQ ID NO: 4780 - protein, 20 aa, Homo sapiens
AGRAAPAPSPRTAAACPTPV

SEQ ID NO: 4781 - skipped

SEQ ID NO: 4782 - protein, 20 aa, Homo sapiens
GVRAQPSVEWQKVARQLACN

SEQ ID NO: 4783 - protein, 20 aa, Homo sapiens
HAAGLHLSRGHQSSSQQWQL

SEQ ID NO: 4784 - protein, 20 aa, Homo sapiens
HRGAPQAPTRLHLLPGHPLL

SEQ ID NO: 4785 - protein, 20 aa, Homo sapiens
HTRLGQTHQHPGLQWGLYGA

SEQ ID NO: 4786 - protein, 20 aa, Homo sapiens
KMSACLSPASSLAHSWMPGV

SEQ ID NO: 4787 - protein, 20 aa, Homo sapiens
KWRSVLCTSPRSWGTQRLWA

SEQ ID NO: 4788 - protein, 20 aa, Homo sapiens
LIHCYMALCSGPRPRCRPHQ

SEQ ID NO: 4789 - protein, 20 aa, Homo sapiens
QAKSGRNTSMGQSSAETANQ

SEQ ID NO: 4790 - protein, 20 aa, Homo sapiens
QQELHLAAGGPHPVPHLPAV

SEQ ID NO: 4791 - protein, 20 aa, Homo sapiens
QYLHPHRVLSPWEPAGHSGE

SEQ ID NO: 4792 - protein, 20 aa, Homo sapiens
SPNAAAKRSRRRTRGVRLSL

SEQ ID NO: 4793 - protein, 20 aa, Homo sapiens
SPVEPHSANPTSSETSCWPR

SEQ ID NO: 4794 - protein, 20 aa, Homo sapiens
TQAEKRFPYTEKARPMEISV

SEQ ID NO: 4795 - protein, 20 aa, Homo sapiens
TSPAPRLNRHPLTSGSWING

SEQ ID NO: 4796 - protein, 19 aa, Homo sapiens
APGPSTCGATSVPRRTGCS

SEQ ID NO: 4797 - skipped

SEQ ID NO: 4798 - protein, 19 aa, Homo sapiens
AVSAEPGPGTSCATTTMAP

SEQ ID NO: 4799 - protein, 19 aa, Homo sapiens
CPCSLTCCPAYCSQQGPWF

SEQ ID NO: 4800 - protein, 19 aa, Homo sapiens
LAEQDRERQPQHRAVGAGV

SEQ ID NO: 4801 - protein, 19 aa, Homo sapiens
LDVWAPKSGRAVPSWLSKS

SEQ ID NO: 4802 - protein, 19 aa, Homo sapiens
LQDLSPRHRYWKGKERGDL

SEQ ID NO: 4803 - protein, 19 aa, Homo sapiens
LRRPARSWRPCSSTGRARS

SEQ ID NO: 4804 - protein, 19 aa, Homo sapiens
PAAGLGRLGPQDFHVFFFN

SEQ ID NO: 4805 - protein, 19 aa, Homo sapiens
PAGGLLRGSWACRERSTHP

SEQ ID NO: 4806 - protein, 19 aa, Homo sapiens
PATVRGLPDQQIQEGDLQV

SEQ ID NO: 4807 - protein, 19 aa, Homo sapiens
PDITCQVRGQHLHPQMQVL

SEQ ID NO: 4808 - protein, 19 aa, Homo sapiens
PEATLLYPNSTGNRGANRR

SEQ ID NO: 4809 - protein, 19 aa, Homo sapiens
PEVTHCDGSLSYRFCLPRR

SEQ ID NO: 4810 - protein, 19 aa, Homo sapiens
PGPLPPQRGPRAERRHRPL

SEQ ID NO: 4811 - protein, 19 aa, Homo sapiens
PHYHTQAPQAPRLFPKRGW

SEQ ID NO: 4812 - protein, 19 aa, Homo sapiens
PLFCIKERWTKTFDFDEER

SEQ ID NO: 4813 - protein, 19 aa, Homo sapiens
PRGLPRRPGGGGEPGAAEP

SEQ ID NO: 4814 - protein, 19 aa, Homo sapiens
QGTSEGGRESSGPLHSAAG

SEQ ID NO: 4815 - protein, 19 aa, Homo sapiens
QRGRGPHHPALRQWRLRRP

SEQ ID NO: 4816 - protein, 19 aa, Homo sapiens
RLLLPRMSRRCLPSGSLET

SEQ ID NO: 4817 - protein, 19 aa, Homo sapiens
RPAEAHLCRQAAGRWPHSF

SEQ ID NO: 4818 - protein, 19 aa, Homo sapiens
SERKWSWMTLPGSWSMRRT

SEQ ID NO: 4819 - protein, 19 aa, Homo sapiens
SIQHLQAPSPSLWPWNMLC

SEQ ID NO: 4820 - protein, 19 aa, Homo sapiens
SRGPPGPNEAPPPSWTPAS

SEQ ID NO: 4821 - skipped

SEQ ID NO: 4822 - protein, 19 aa, Homo sapiens
VQPALTPRPATGKSTSTSC

SEQ ID NO: 4823 - protein, 19 aa, Homo sapiens
VSVSRSPQRVSPMNTEGRP

SEQ ID NO: 4824 - protein, 19 aa, Homo sapiens
YIWALSISSTSMIKPLMRN

SEQ ID NO: 4825 - protein, 18 aa, Homo sapiens
APLRLWSWCGTSQTYFGS

SEQ ID NO: 4826 - protein, 18 aa, Homo sapiens
AQPGVSIRFVHRPFLGRW

SEQ ID NO: 4827 - skipped

SEQ ID NO: 4828 - protein, 18 aa, Homo sapiens
CRTRPRKAASAQSSRSGG

SEQ ID NO: 4829 - protein, 18 aa, Homo sapiens
GTASPWCWASTSSTARRT

SEQ ID NO: 4830 - protein, 18 aa, Homo sapiens
HFLRRTQAEHTVLLHRRV

SEQ ID NO: 4831 - protein, 18 aa, Homo sapiens
HHQCQPWSPTLPRTPLLP

SEQ ID NO: 4832 - protein, 18 aa, Homo sapiens
NEAGVEDRHLRGRAVWGC

SEQ ID NO: 4833 - protein, 18 aa, Homo sapiens
PAAAHRHGPTHHPSAGLQ

SEQ ID NO: 4834 - protein, 18 aa, Homo sapiens
PAPATTSPSQAAQLCHDG

SEQ ID NO: 4835 - protein, 18 aa, Homo sapiens
PATPTPTSPTCRAHQAAL

SEQ ID NO: 4836 - protein, 18 aa, Homo sapiens
PGPGLLPLSMQLQPPYHG

SEQ ID NO: 4837 - protein, 18 aa, Homo sapiens
PGRQERLRGPPSLSDRNR

SEQ ID NO: 4838 - protein, 18 aa, Homo sapiens
PPPGQPQVFGGCFWFSPN

SEQ ID NO: 4839 - protein, 18 aa, Homo sapiens
PRAGPRCHRRRRRCCCCC

SEQ ID NO: 4840 - protein, 18 aa, Homo sapiens
QCLPCSYPCCQPYPAGQL

SEQ ID NO: 4841 - protein, 18 aa, Homo sapiens
QGSASRPLSAPLWRGFLL

SEQ ID NO: 4842 - protein, 18 aa, Homo sapiens
QTPFQTSHAQEEQVRWRG

SEQ ID NO: 4843 - protein, 18 aa, Homo sapiens
RAAPRAAGTGGQGHVEGS

SEQ ID NO: 4844 - protein, 18 aa, Homo sapiens
RGTAHARCAPSRESSSES

SEQ ID NO: 4845 - protein, 18 aa, Homo sapiens
RKTRAAPRTPLPFFLSQV

SEQ ID NO: 4846 - protein, 18 aa, Homo sapiens
RLPHNPSPFSALPEGEQP

SEQ ID NO: 4847 - protein, 18 aa, Homo sapiens
RLVLPFGSEPQPLLPLGL

SEQ ID NO: 4848 - protein, 18 aa, Homo sapiens
RPLPGNGVRKAQNGWCRH

SEQ ID NO: 4849 - protein, 18 aa, Homo sapiens
RWTGQLLSTDADRDGAWE

SEQ ID NO: 4850 - protein, 18 aa, Homo sapiens
SCQLCSHHLCHTGRGPPL

SEQ ID NO: 4851 - protein, 18 aa, Homo sapiens
SPDTLVVPHHQPHHHPRS

SEQ ID NO: 4852 - protein, 18 aa, Homo sapiens
TPATSHLQYGLHITEVSG

SEQ ID NO: 4853 - protein, 18 aa, Homo sapiens
TPGPAPSCSGGSGSADRA

SEQ ID NO: 4854 - skipped

SEQ ID NO: 4855 - protein, 18 aa, Homo sapiens
VRPTRRAPLTRPPLSLPT

SEQ ID NO: 4856 - protein, 18 aa, Homo sapiens
WLHRLWWPHGAYCVQRCT

SEQ ID NO: 4857 - protein, 17 aa, Homo sapiens
AAHSGQDRGGCRQGRVC

SEQ ID NO: 4858 - protein, 17 aa, Homo sapiens
AHRNTLCYDKIPSNLRN

SEQ ID NO: 4859 - protein, 17 aa, Homo sapiens
ALGPISCSGASASWPPA

SEQ ID NO: 4860 - protein, 17 aa, Homo sapiens
FPSQNSSGTHCTSPPTC

SEQ ID NO: 4861 - protein, 17 aa, Homo sapiens
HRAAPLSPQGPRRPPRS

SEQ ID NO: 4862 - protein, 17 aa, Homo sapiens
KLPTGPPSPRPPRPQCT

SEQ ID NO: 4863 - protein, 17 aa, Homo sapiens
KPAAPRGPIRAKTASIF

SEQ ID NO: 4864 - protein, 17 aa, Homo sapiens
MKSFWLPDSLRMEPRAW

SEQ ID NO: 4865 - protein, 17 aa, Homo sapiens
NRLPLQSWAKRICPISS

SEQ ID NO: 4866 - protein, 17 aa, Homo sapiens
NSLALCWVPACWVTCLH

SEQ ID NO: 4867 - protein, 17 aa, Homo sapiens
PAGEGPAHPTGAAAALL

SEQ ID NO: 4868 - protein, 17 aa, Homo sapiens
PAQLSPLTTSTPCWGIS

SEQ ID NO: 4869 - protein, 17 aa, Homo sapiens
PLLLPLPMQWPPEPQPV

SEQ ID NO: 4870 - protein, 17 aa, Homo sapiens
PMGPPPECCSSWLRRIE

SEQ ID NO: 4871 - protein, 17 aa, Homo sapiens
PPTARTRCRWNHRSCQA

SEQ ID NO: 4872 - protein, 17 aa, Homo sapiens
QPVLLCQWPLHPHLLDV

SEQ ID NO: 4873 - protein, 17 aa, Homo sapiens
RAPRPPGPNLTPTHDGA

SEQ ID NO: 4874 - protein, 17 aa, Homo sapiens
RPASSWCSPSRSVPSAS

SEQ ID NO: 4875 - protein, 17 aa, Homo sapiens
RRPPRRRRNSLSRSLSN

SEQ ID NO: 4876 - protein, 17 aa, Homo sapiens
SATGRSCGTKSRPRTSR

SEQ ID NO: 4877 - protein, 17 aa, Homo sapiens
SHRPPRASSAGDLQCQA

SEQ ID NO: 4878 - protein, 17 aa, Homo sapiens
SLRRATQSLASGPGRPV

SEQ ID NO: 4879 - protein, 17 aa, Homo sapiens
SRTPLCSGRGLSSRNFC

SEQ ID NO: 4880 - protein, 17 aa, Homo sapiens
SSWARPPRPPGLPRLLF

SEQ ID NO: 4881 - protein, 17 aa, Homo sapiens
TAYSYTSRASTHPSIPC

SEQ ID NO: 4882 - protein, 17 aa, Homo sapiens
TCRAIVTMTSCLYLRTT

SEQ ID NO: 4883 - protein, 17 aa, Homo sapiens
VISLCQSWMNKSHSHTA

SEQ ID NO: 4884 - protein, 16 aa, Homo sapiens
AASAWVPRPGTPPARS

SEQ ID NO: 4885 - protein, 16 aa, Homo sapiens
APWAASWSRSRAAAAA

SEQ ID NO: 4886 - protein, 16 aa, Homo sapiens
CGSASPHLQQHGGGGL

SEQ ID NO: 4887 - skipped

SEQ ID NO: 4888 - protein, 16 aa, Homo sapiens
DHQGSFRLTFFSWRLK

SEQ ID NO: 4889 - protein, 16 aa, Homo sapiens
DPRDLWSTCRSRTDPS

SEQ ID NO: 4890 - protein, 16 aa, Homo sapiens
GSPTPTPLSASGLRQW

SEQ ID NO: 4891 - protein, 16 aa, Homo sapiens
HASFSGLLPPRLGQNG

SEQ ID NO: 4892 - protein, 16 aa, Homo sapiens
HVSNKPGGDCPVQCSV

SEQ ID NO: 4893 - protein, 16 aa, Homo sapiens
KLEEEGEATPGLQVLA

SEQ ID NO: 4894 - skipped

SEQ ID NO: 4895 - protein, 16 aa, Homo sapiens
PAPGHQHSRLPPRASD

SEQ ID NO: 4896 - protein, 16 aa, Homo sapiens
PEPGLPDLHHHWRQKL

SEQ ID NO: 4897 - protein, 16 aa, Homo sapiens
PPLLFPATLRPPSAFP

SEQ ID NO: 4898 - protein, 16 aa, Homo sapiens
PPRAPLAQEVPAQGRL

SEQ ID NO: 4899 - protein, 16 aa, Homo sapiens
PVFSAPGSYRQTCGCL

SEQ ID NO: 4900 - protein, 16 aa, Homo sapiens
PVPRSTCGYVPASVSG

SEQ ID NO: 4901 - protein, 16 aa, Homo sapiens
QCKPQGQAKPDQHRGL

SEQ ID NO: 4902 - protein, 16 aa, Homo sapiens
QHPHSRACCCKVQILG

SEQ ID NO: 4903 - protein, 16 aa, Homo sapiens
QRRLVATPLQTAQRRF

SEQ ID NO: 4904 - protein, 16 aa, Homo sapiens
RAWSKKQFTYQFFQTH

SEQ ID NO: 4905 - protein, 16 aa, Homo sapiens
RCRCIQETSCLSQEGG

SEQ ID NO: 4906 - protein, 16 aa, Homo sapiens
RGGQPPAVAAVVGARC

SEQ ID NO: 4907 - protein, 16 aa, Homo sapiens
RGLPEPLLQLYHLPAG

SEQ ID NO: 4908 - protein, 16 aa, Homo sapiens
RHASPQGLLGEHLRRG

SEQ ID NO: 4909 - protein, 16 aa, Homo sapiens
RIRVSSRAPRPPWCAE

SEQ ID NO: 4910 - protein, 16 aa, Homo sapiens
RPSWPIRSGGAPGPAE

SEQ ID NO: 4911 - protein, 16 aa, Homo sapiens
RRGRPSGSHGRNGPNG

SEQ ID NO: 4912 - protein, 16 aa, Homo sapiens
RRGWLHLSLGPQGRPV

SEQ ID NO: 4913 - protein, 16 aa, Homo sapiens
RSSGLRWSWPREEPTA

SEQ ID NO: 4914 - protein, 16 aa, Homo sapiens
SAHHHLPRTGVGRTEV

SEQ ID NO: 4915 - protein, 16 aa, Homo sapiens
SPPAATHGPSQRAEEI

SEQ ID NO: 4916 - protein, 16 aa, Homo sapiens
SRCESAAWTRRPSISC

SEQ ID NO: 4917 - protein, 16 aa, Homo sapiens
TMATLTPSSSTTHSGS

SEQ ID NO: 4918 - protein, 16 aa, Homo sapiens
TRAPAQTWWRRRARSC

SEQ ID NO: 4919 - protein, 16 aa, Homo sapiens
VSGSWSLGHPWCCLGL

SEQ ID NO: 4920 - protein, 15 aa, Homo sapiens
ASSTECWQSSDSLLC

SEQ ID NO: 4921 - protein, 15 aa, Homo sapiens
CWTSHLMQMTRPWLN

SEQ ID NO: 4922 - protein, 15 aa, Homo sapiens
GPQERARAGRTMRAQ

SEQ ID NO: 4923 - protein, 15 aa, Homo sapiens
HDLLPSPAPTQEPLL

SEQ ID NO: 4924 - protein, 15 aa, Homo sapiens
HHQSTSSNTVRRKFM

SEQ ID NO: 4925 - protein, 15 aa, Homo sapiens
HPGKWAEGGKTAKRD

SEQ ID NO: 4926 - protein, 15 aa, Homo sapiens
HPPAPASHPAPCQPT

SEQ ID NO: 4927 - protein, 15 aa, Homo sapiens
PAPAPGRGVAPGGGG

SEQ ID NO: 4928 - protein, 15 aa, Homo sapiens
PDPGLCAEFPDRLKC

SEQ ID NO: 4929 - protein, 15 aa, Homo sapiens
PEGPGPAGRDTAGHQ

SEQ ID NO: 4930 - protein, 15 aa, Homo sapiens
PGSRAHWPPADAATR

SEQ ID NO: 4931 - protein, 15 aa, Homo sapiens
PHLCRELHPRYLPVH

SEQ ID NO: 4932 - protein, 15 aa, Homo sapiens
PHSHLDQKGLKYGPE

SEQ ID NO: 4933 - protein, 15 aa, Homo sapiens
PLPPTSPGRDVAQDP

SEQ ID NO: 4934 - protein, 15 aa, Homo sapiens
PLRGHLPQFLHHRVW

SEQ ID NO: 4935 - protein, 15 aa, Homo sapiens
PPNPAFPYGLFTGPF

SEQ ID NO: 4936 - protein, 15 aa, Homo sapiens
PSSQICHSLYPCDIF

SEQ ID NO: 4937 - protein, 15 aa, Homo sapiens
QEDPGGGCQRRPPRH

SEQ ID NO: 4938 - protein, 15 aa, Homo sapiens
QGQEAPGHQRDPSAL

SEQ ID NO: 4939 - protein, 15 aa, Homo sapiens
QVRQDRRHGHADAPE

SEQ ID NO: 4940 - skipped

SEQ ID NO: 4941 - protein, 15 aa, Homo sapiens
RRPCTYSGSTTRSHS

SEQ ID NO: 4942 - protein, 15 aa, Homo sapiens
RTRPCLTPWCTRRSR

SEQ ID NO: 4943 - protein, 15 aa, Homo sapiens
RWRKIFKDGRAYIKH

SEQ ID NO: 4944 - protein, 15 aa, Homo sapiens
SCGAASCSPGAGPLG

SEQ ID NO: 4945 - protein, 15 aa, Homo sapiens
SFSLCTSQGFPFDPK

SEQ ID NO: 4946 - protein, 15 aa, Homo sapiens
SFSVAPQPGGAGFQY

SEQ ID NO: 4947 - skipped

SEQ ID NO: 4948 - protein, 15 aa, Homo sapiens
SWSCTRWSLSSSVMK

SEQ ID NO: 4949 - protein, 15 aa, Homo sapiens
TRFESPRGTTALPSE

SEQ ID NO: 4950 - protein, 15 aa, Homo sapiens
TSCPPRTGSPCPRPT

SEQ ID NO: 4951 - skipped

SEQ ID NO: 4952 - protein, 15 aa, Homo sapiens
VAQSLCTASTMPTAT

SEQ ID NO: 4953 - protein, 15 aa, Homo sapiens
VLFKADQSESSLSSG

SEQ ID NO: 4954 - protein, 15 aa, Homo sapiens
VQTPRPSQAGSAPWS

SEQ ID NO: 4955 - protein, 15 aa, Homo sapiens
WIGQPPPTATWRRWI

SEQ ID NO: 4956 - protein, 14 aa, Homo sapiens
AMKQIHPLLLPKNS

SEQ ID NO: 4957 - protein, 14 aa, Homo sapiens
CGDSSTCAQRWKLS

SEQ ID NO: 4958 - skipped

SEQ ID NO: 4959 - protein, 14 aa, Homo sapiens
DLEHHGGVTRHRHR

SEQ ID NO: 4960 - protein, 14 aa, Homo sapiens
DPMWPPPLSVTMSL

SEQ ID NO: 4961 - protein, 14 aa, Homo sapiens
GCILPFLACDWLGC

SEQ ID NO: 4962 - protein, 14 aa, Homo sapiens
GDFVLSRSCSLVGS

SEQ ID NO: 4963 - protein, 14 aa, Homo sapiens
GERIPWRSLWSSFE

SEQ ID NO: 4964 - protein, 14 aa, Homo sapiens
GFKMQSRRRKWAGN

SEQ ID NO: 4965 - protein, 14 aa, Homo sapiens
GLASPLAACRLTSP

SEQ ID NO: 4966 - protein, 14 aa, Homo sapiens
GPRPPAQPPPPSGL

SEQ ID NO: 4967 - protein, 14 aa, Homo sapiens
GRVGLKPLSGTRWS

SEQ ID NO: 4968 - protein, 14 aa, Homo sapiens
HRGEQRARSKSPPH

SEQ ID NO: 4969 - protein, 14 aa, Homo sapiens
KTLNVSACAPRPFW

SEQ ID NO: 4970 - protein, 14 aa, Homo sapiens
LLLQERHQPDRRCG

SEQ ID NO: 4971 - protein, 14 aa, Homo sapiens
LLPLPQLLLLCHLL

SEQ ID NO: 4972 - protein, 14 aa, Homo sapiens
LVHSWAEEAADEAA

SEQ ID NO: 4973 - protein, 14 aa, Homo sapiens
NGDCHGCPEGRQSL

SEQ ID NO: 4974 - protein, 14 aa, Homo sapiens
PAATHGPSQRAEEI

SEQ ID NO: 4975 - protein, 14 aa, Homo sapiens
PAEPLCLLSFGHLS

SEQ ID NO: 4976 - protein, 14 aa, Homo sapiens
PAPHHEFPASAQAG

SEQ ID NO: 4977 - protein, 14 aa, Homo sapiens
PEASWDCRWHSPRP

SEQ ID NO: 4978 - protein, 14 aa, Homo sapiens
PGSWRAGQRAVSAQ

SEQ ID NO: 4979 - protein, 14 aa, Homo sapiens
PLPKMNTTRMGIWI

SEQ ID NO: 4980 - protein, 14 aa, Homo sapiens
PLRDPTEGKVLHWK

SEQ ID NO: 4981 - protein, 14 aa, Homo sapiens
QPLPVEGTGPGRGS

SEQ ID NO: 4982 - protein, 14 aa, Homo sapiens
QPLWTATGLPRTRP

SEQ ID NO: 4983 - protein, 14 aa, Homo sapiens
RMLGLALPWELFLI

SEQ ID NO: 4984 - protein, 14 aa, Homo sapiens
RPPRAAREARPGRH

SEQ ID NO: 4985 - protein, 14 aa, Homo sapiens
RPSPPACAATCPTR

SEQ ID NO: 4986 - protein, 14 aa, Homo sapiens
RRAPPGWACGRGAF

SEQ ID NO: 4987 - protein, 14 aa, Homo sapiens
RTRSSWPPTGPLCP

SEQ ID NO: 4988 - protein, 14 aa, Homo sapiens
SRPPCSWNWRTRTR

SEQ ID NO: 4989 - protein, 14 aa, Homo sapiens
TCWLEVPSGGRLCL

SEQ ID NO: 4990 - protein, 14 aa, Homo sapiens
TLGAALPPWPVEGS

SEQ ID NO: 4991 - protein, 14 aa, Homo sapiens
TPPQPQSVLCATGG

SEQ ID NO: 4992 - protein, 14 aa, Homo sapiens
TTRCTSTATRAPSP

SEQ ID NO: 4993 - protein, 13 aa, Homo sapiens
AAWPAASRVWTMS

SEQ ID NO: 4994 - protein, 13 aa, Homo sapiens
CHPHHPQVPHHPL

SEQ ID NO: 4995 - protein, 13 aa, Homo sapiens
CIQQARWRLSSPM

SEQ ID NO: 4996 - protein, 13 aa, Homo sapiens
CPGRRPPATAHLL

SEQ ID NO: 4997 - protein, 13 aa, Homo sapiens
GCSHQLPCQTLGF

SEQ ID NO: 4998 - protein, 13 aa, Homo sapiens
GPEAARPQPHPHA

SEQ ID NO: 4999 - protein, 13 aa, Homo sapiens
HPCRASPAASGRQ

SEQ ID NO: 5000 - protein, 13 aa, Homo sapiens
ITFRYLLAVLILF

SEQ ID NO: 5001 - protein, 13 aa, Homo sapiens
LCQCQDLPKGCPQ

SEQ ID NO: 5002 - protein, 13 aa, Homo sapiens
LETWSTLQPSGQW

SEQ ID NO: 5003 - protein, 13 aa, Homo sapiens
LRLDSRHLHRPGS

SEQ ID NO: 5004 - protein, 13 aa, Homo sapiens
LSSSPTSLCRGRC

SEQ ID NO: 5005 - protein, 13 aa, Homo sapiens
MTRCASLHCPTTP

SEQ ID NO: 5006 - skipped

SEQ ID NO: 5007 - protein, 13 aa, Homo sapiens
PAGWPQAAPRPSA

SEQ ID NO: 5008 - protein, 13 aa, Homo sapiens
PCSYPEQRPKPPS

SEQ ID NO: 5009 - skipped

SEQ ID NO: 5010 - protein, 13 aa, Homo sapiens
PGCSVWLCHGSSS

SEQ ID NO: 5011 - protein, 13 aa, Homo sapiens
PGRRPPTRRAASV

SEQ ID NO: 5012 - protein, 13 aa, Homo sapiens
PKTQTESKASEYS

SEQ ID NO: 5013 - protein, 13 aa, Homo sapiens
PRFGPYAALHPRV

SEQ ID NO: 5014 - protein, 13 aa, Homo sapiens
QCGDTCADRGEIH

SEQ ID NO: 5015 - protein, 13 aa, Homo sapiens
QGVGPYSPRPPDF

SEQ ID NO: 5016 - protein, 13 aa, Homo sapiens
QHPSYTSRGLPGL

SEQ ID NO: 5017 - protein, 13 aa, Homo sapiens
RAGPVLAGLCPLL

SEQ ID NO: 5018 - protein, 13 aa, Homo sapiens
RCPSTGRRTTSSS

SEQ ID NO: 5019 - protein, 13 aa, Homo sapiens
RGQVQQTLCLLND

SEQ ID NO: 5020 - protein, 13 aa, Homo sapiens
RGRSQDCDQVCDQ

SEQ ID NO: 5021 - protein, 13 aa, Homo sapiens
RKTRAAPRTPLPV

SEQ ID NO: 5022 - protein, 13 aa, Homo sapiens
RMKDPRVLVPPIS

SEQ ID NO: 5023 - protein, 13 aa, Homo sapiens
RRAWPRGSRWSPW

SEQ ID NO: 5024 - protein, 13 aa, Homo sapiens
SAAATAAAAVSSP

SEQ ID NO: 5025 - protein, 13 aa, Homo sapiens
SIESISFFSMETS

SEQ ID NO: 5026 - protein, 13 aa, Homo sapiens
SKLTSKTKLAKKC

SEQ ID NO: 5027 - protein, 13 aa, Homo sapiens
SLCAESARRPSPQ

SEQ ID NO: 5028 - protein, 13 aa, Homo sapiens
SLRPANAEPLLLQ

SEQ ID NO: 5029 - protein, 13 aa, Homo sapiens
SLSPGPKRTQIWS

SEQ ID NO: 5030 - protein, 13 aa, Homo sapiens
SQGRSPHWCRCRG

SEQ ID NO: 5031 - protein, 13 aa, Homo sapiens
SQKLPAWPARRRA

SEQ ID NO: 5032 - protein, 13 aa, Homo sapiens
SQWGPPPSAAAAG

SEQ ID NO: 5033 - protein, 13 aa, Homo sapiens
SQWRLNQRGHRSD

SEQ ID NO: 5034 - protein, 13 aa, Homo sapiens
SRHSPPSPRPHPC

SEQ ID NO: 5035 - protein, 13 aa, Homo sapiens
STTRATLSSSARS

SEQ ID NO: 5036 - protein, 13 aa, Homo sapiens
TMGPSGRSRTWFA

SEQ ID NO: 5037 - protein, 13 aa, Homo sapiens
TPGRWRPGADGQS

SEQ ID NO: 5038 - protein, 13 aa, Homo sapiens
WVPHTETPSAGVV

SEQ ID NO: 5039 - protein, 12 aa, Homo sapiens
APSRPPTTPTPP

SEQ ID NO: 5040 - protein, 12 aa, Homo sapiens
AREGRAATVAES

SEQ ID NO: 5041 - protein, 12 aa, Homo sapiens
EPALSALKAPRR

SEQ ID NO: 5042 - protein, 12 aa, Homo sapiens
GCMGSEIWKSCT

SEQ ID NO: 5043 - protein, 12 aa, Homo sapiens
HGTAAPCLPSAV

SEQ ID NO: 5044 - protein, 12 aa, Homo sapiens
HTSAPAPRAWSG

SEQ ID NO: 5045 - protein, 12 aa, Homo sapiens
ISVRWMASASVT

SEQ ID NO: 5046 - protein, 12 aa, Homo sapiens
KSCPSSARNNWA

SEQ ID NO: 5047 - protein, 12 aa, Homo sapiens
LFPGARPDGGNL

SEQ ID NO: 5048 - protein, 12 aa, Homo sapiens
LNHRKGSSVQNP

SEQ ID NO: 5049 - protein, 12 aa, Homo sapiens
PAPATQAPCMMT

SEQ ID NO: 5050 - protein, 12 aa, Homo sapiens
PAPIFLLWGPLG

SEQ ID NO: 5051 - protein, 12 aa, Homo sapiens
PATASCAAQWPD

SEQ ID NO: 5052 - protein, 12 aa, Homo sapiens
PLLVLTPPGGLL

SEQ ID NO: 5053 - protein, 12 aa, Homo sapiens
PPSSHPRPLPAG

SEQ ID NO: 5054 - protein, 12 aa, Homo sapiens
PRTPLRLPSGVL

SEQ ID NO: 5055 - skipped

SEQ ID NO: 5056 - protein, 12 aa, Homo sapiens
PVLAPIMSRGRA

SEQ ID NO: 5057 - protein, 12 aa, Homo sapiens
PYTCSLHCHGRA

SEQ ID NO: 5058 - protein, 12 aa, Homo sapiens
QKLHQKQLQNFL

SEQ ID NO: 5059 - protein, 12 aa, Homo sapiens
QTSLSALKSSGT

SEQ ID NO: 5060 - protein, 12 aa, Homo sapiens
RAVCPRESLRRP

SEQ ID NO: 5061 - protein, 12 aa, Homo sapiens
REHSAARKFYKT

SEQ ID NO: 5062 - protein, 12 aa, Homo sapiens
RGRRRGPGRGGR

SEQ ID NO: 5063 - protein, 12 aa, Homo sapiens
RRPEPAPSWLRA

SEQ ID NO: 5064 - protein, 12 aa, Homo sapiens
SNGSQDPAPYDS

SEQ ID NO: 5065 - protein, 12 aa, Homo sapiens
SPRCPFHMSSCR

SEQ ID NO: 5066 - protein, 12 aa, Homo sapiens
SRETPPSHSPPA

SEQ ID NO: 5067 - protein, 12 aa, Homo sapiens
SSRHASVQHLPL

SEQ ID NO: 5068 - protein, 12 aa, Homo sapiens
STSSTTTPARLL

SEQ ID NO: 5069 - protein, 12 aa, Homo sapiens
TPRSLHSCHRQV

SEQ ID NO: 5070 - protein, 12 aa, Homo sapiens
TSLPLLTTATST

SEQ ID NO: 5071 - protein, 12 aa, Homo sapiens
VPLLEHTPTSPD

SEQ ID NO: 5072 - protein, 12 aa, Homo sapiens
WPASSHAPRSLG

SEQ ID NO: 5073 - protein, 12 aa, Homo sapiens
WPFSILGSPGPA

SEQ ID NO: 5074 - protein, 12 aa, Homo sapiens
WTWGCRWARHRL

SEQ ID NO: 5075 - protein, 11 aa, Homo sapiens
ASAATATAPRG

SEQ ID NO: 5076 - protein, 11 aa, Homo sapiens
CGGLSPCDWQL

SEQ ID NO: 5077 - protein, 11 aa, Homo sapiens
CQWDPQSSGAL

SEQ ID NO: 5078 - protein, 11 aa, Homo sapiens
GCTATGRASGW

SEQ ID NO: 5079 - protein, 11 aa, Homo sapiens
GVWTWPSTRTP

SEQ ID NO: 5080 - skipped

SEQ ID NO: 5081 - protein, 11 aa, Homo sapiens
KTAPETAAKFL

SEQ ID NO: 5082 - protein, 11 aa, Homo sapiens
LCLASLSSKTS

SEQ ID NO: 5083 - protein, 11 aa, Homo sapiens
LRGHAQMCRVN

SEQ ID NO: 5084 - protein, 11 aa, Homo sapiens
LSQLVICFGAE

SEQ ID NO: 5085 - protein, 11 aa, Homo sapiens
LVPRGASSGLS

SEQ ID NO: 5086 - protein, 11 aa, Homo sapiens
MRRPPPSAPMT

SEQ ID NO: 5087 - protein, 11 aa, Homo sapiens
PASRRGEKTNL

SEQ ID NO: 5088 - protein, 11 aa, Homo sapiens
PCWSRCSLRQM

SEQ ID NO: 5089 - protein, 11 aa, Homo sapiens
PEPSKHLLQGM

SEQ ID NO: 5090 - protein, 11 aa, Homo sapiens
PGEQLWQSVWE

SEQ ID NO: 5091 - protein, 11 aa, Homo sapiens
PGISHRLPAGL

SEQ ID NO: 5092 - protein, 11 aa, Homo sapiens
PGQRFCHALCD

SEQ ID NO: 5093 - protein, 11 aa, Homo sapiens
PHLQSHSISLP

SEQ ID NO: 5094 - protein, 11 aa, Homo sapiens
PLHQFLWLLEL

SEQ ID NO: 5095 - protein, 11 aa, Homo sapiens
PLQPYLLPCLL

SEQ ID NO: 5096 - protein, 11 aa, Homo sapiens
PPGPRCVQEGA

SEQ ID NO: 5097 - protein, 11 aa, Homo sapiens
PQPPGCCPWPA

SEQ ID NO: 5098 - protein, 11 aa, Homo sapiens
PQRDPSAGEGK

SEQ ID NO: 5099 - protein, 11 aa, Homo sapiens
PQVPPQLPQAG

SEQ ID NO: 5100 - protein, 11 aa, Homo sapiens
RGGQRWLLHVL

SEQ ID NO: 5101 - protein, 11 aa, Homo sapiens
RPAAAPTRTSS

SEQ ID NO: 5102 - protein, 11 aa, Homo sapiens
RRRRGGLQGPR

SEQ ID NO: 5103 - protein, 11 aa, Homo sapiens
SCPQAIPRSPC

SEQ ID NO: 5104 - protein, 11 aa, Homo sapiens
SPRGVRARRAQ

SEQ ID NO: 5105 - protein, 11 aa, Homo sapiens
SSASAQMPLTP

SEQ ID NO: 5106 - protein, 11 aa, Homo sapiens
SSEGSATSMGL

SEQ ID NO: 5107 - protein, 11 aa, Homo sapiens
TSATSPNAVAA

SEQ ID NO: 5108 - protein, 11 aa, Homo sapiens
TSSLTMESSGH

SEQ ID NO: 5109 - protein, 11 aa, Homo sapiens
VFCLFLVKHFC

SEQ ID NO: 5110 - protein, 11 aa, Homo sapiens
VWPRHPCLLWA

SEQ ID NO: 5111 - protein, 11 aa, Homo sapiens
WGILSTWLLSG

SEQ ID NO: 5112 - protein, 10 aa, Homo sapiens
AQWAPAASPA

SEQ ID NO: 5113 - protein, 10 aa, Homo sapiens
CQSAECQPHC

SEQ ID NO: 5114 - protein, 10 aa, Homo sapiens
DCHPRAPLPW

SEQ ID NO: 5115-5116 - skipped (2 entries)

SEQ ID NO: 5117 - protein, 10 aa, Homo sapiens
GLRDRLGAGV

SEQ ID NO: 5118 - protein, 10 aa, Homo sapiens
GPVMAWTSRM

SEQ ID NO: 5119 - protein, 10 aa, Homo sapiens
HEAGNGCQAL

SEQ ID NO: 5120 - protein, 10 aa, Homo sapiens
HSGGGHTETD

SEQ ID NO: 5121 - protein, 10 aa, Homo sapiens
IKASSMPQTP

SEQ ID NO: 5122 - skipped

SEQ ID NO: 5123 - protein, 10 aa, Homo sapiens
LPAASGTQVV

SEQ ID NO: 5124 - protein, 10 aa, Homo sapiens
LPAPPARRPC

SEQ ID NO: 5125 - protein, 10 aa, Homo sapiens
LQPQPRRLPA

SEQ ID NO: 5126 - protein, 10 aa, Homo sapiens
NIHLSSRNQK

SEQ ID NO: 5127 - protein, 10 aa, Homo sapiens
PARRQGLRGS

SEQ ID NO: 5128 - protein, 10 aa, Homo sapiens
PASCYIRGAE

SEQ ID NO: 5129 - protein, 10 aa, Homo sapiens
PAWCLHPSSP

SEQ ID NO: 5130 - skipped

SEQ ID NO: 5131 - protein, 10 aa, Homo sapiens
PGALLNPSRG

SEQ ID NO: 5132 - protein, 10 aa, Homo sapiens
PPPPLKSASA

SEQ ID NO: 5133 - skipped

SEQ ID NO: 5134 - protein, 10 aa, Homo sapiens
PSLGSPGKCV

SEQ ID NO: 5135 - protein, 10 aa, Homo sapiens
PTASRDAGPV

SEQ ID NO: 5136 - protein, 10 aa, Homo sapiens
PWRSCPAPAT

SEQ ID NO: 5137 - protein, 10 aa, Homo sapiens
QAAAAVFISG

SEQ ID NO: 5138 - protein, 10 aa, Homo sapiens
QCRLHPPPAA

SEQ ID NO: 5139 - protein, 10 aa, Homo sapiens
QDGCQDVPGL

SEQ ID NO: 5140 - protein, 10 aa, Homo sapiens
QDTRDPPPCL

SEQ ID NO: 5141 - protein, 10 aa, Homo sapiens
QDTYDPPPHL

SEQ ID NO: 5142 - protein, 10 aa, Homo sapiens
QLGAPGPAAP

SEQ ID NO: 5143 - protein, 10 aa, Homo sapiens
QSPTGRSWSI

SEQ ID NO: 5144 - protein, 10 aa, Homo sapiens
RALQTSTTRY

SEQ ID NO: 5145 - protein, 10 aa, Homo sapiens
RLRSRPTTGT

SEQ ID NO: 5146 - protein, 10 aa, Homo sapiens
RSSSTNPLSS

SEQ ID NO: 5147 - protein, 10 aa, Homo sapiens
RTQCGHHHCQ

SEQ ID NO: 5148 - skipped

SEQ ID NO: 5149 - protein, 10 aa, Homo sapiens
RVLATHPQAT

SEQ ID NO: 5150 - protein, 10 aa, Homo sapiens
RYAGTRCCCH

SEQ ID NO: 5151 - protein, 10 aa, Homo sapiens
SHPHPHLPHL

SEQ ID NO: 5152 - protein, 10 aa, Homo sapiens
SSHPRPLPAG

SEQ ID NO: 5153 - protein, 10 aa, Homo sapiens
SSTGSKTWPC

SEQ ID NO: 5154 - protein, 10 aa, Homo sapiens
TIKITSTFIS

SEQ ID NO: 5155 - protein, 10 aa, Homo sapiens
TPRTGGPRCW

SEQ ID NO: 5156 - protein, 10 aa, Homo sapiens
TSSPSSRASW

SEQ ID NO: 5157 - protein, 10 aa, Homo sapiens
WYSGAWGLCS

SEQ ID NO: 5158 - protein, 9 aa, Homo sapiens
CPSCMPSGT

SEQ ID NO: 5159 - skipped

SEQ ID NO: 5160 - protein, 9 aa, Homo sapiens
DLGLPLGQA

SEQ ID NO: 5161 - protein, 9 aa, Homo sapiens
EWKCSPLSL

SEQ ID NO: 5162 - protein, 9 aa, Homo sapiens
GLRRRERHI

SEQ ID NO: 5163 - protein, 9 aa, Homo sapiens
GTNPRLMEL

SEQ ID NO: 5164 - protein, 9 aa, Homo sapiens
HVKRHAVNL

SEQ ID NO: 5165 - skipped

SEQ ID NO: 5166 - protein, 9 aa, Homo sapiens
IRRVSPGQG

SEQ ID NO: 5167 - protein, 9 aa, Homo sapiens
ITGGTGLLL

SEQ ID NO: 5168 - protein, 9 aa, Homo sapiens
KVRWPWVPH

SEQ ID NO: 5169 - protein, 9 aa, Homo sapiens
LEHLNHSHL

SEQ ID NO: 5170 - protein, 9 aa, Homo sapiens
LLLCHDPPQ

SEQ ID NO: 5171 - protein, 9 aa, Homo sapiens
NATSACQDP

SEQ ID NO: 5172 - skipped

SEQ ID NO: 5173 - protein, 9 aa, Homo sapiens
NRGAQPLNN

SEQ ID NO: 5174 - protein, 9 aa, Homo sapiens
NSLQRRGPS

SEQ ID NO: 5175 - protein, 9 aa, Homo sapiens
PACHFSQLH

SEQ ID NO: 5176 - protein, 9 aa, Homo sapiens
PPRRPSTAN

SEQ ID NO: 5177 - protein, 9 aa, Homo sapiens
PPTESDFIA

SEQ ID NO: 5178 - protein, 9 aa, Homo sapiens
PQEREERPQ

SEQ ID NO: 5179 - protein, 9 aa, Homo sapiens
PSHQATRLW

SEQ ID NO: 5180 - protein, 9 aa, Homo sapiens
QAALPGPRL

SEQ ID NO: 5181 - protein, 9 aa, Homo sapiens
QDGPHGLQP

SEQ ID NO: 5182 - protein, 9 aa, Homo sapiens
QIPKSSPAT

SEQ ID NO: 5183 - protein, 9 aa, Homo sapiens
QMPSPKARR

SEQ ID NO: 5184 - protein, 9 aa, Homo sapiens
QWLPRPRPL

SEQ ID NO: 5185 - protein, 9 aa, Homo sapiens
QWPCGAGHE

SEQ ID NO: 5186 - protein, 9 aa, Homo sapiens
REPCVPGKV

SEQ ID NO: 5187 - protein, 9 aa, Homo sapiens
RNERGGRVV

SEQ ID NO: 5188 - protein, 9 aa, Homo sapiens
RRIAVLVFQ

SEQ ID NO: 5189 - protein, 9 aa, Homo sapiens
RSEVLSCPL

SEQ ID NO: 5190 - protein, 9 aa, Homo sapiens
RSGPARLPV

SEQ ID NO: 5191 - protein, 9 aa, Homo sapiens
SEGDATGAR

SEQ ID NO: 5192 - protein, 9 aa, Homo sapiens
SSRCWAGAW

SEQ ID NO: 5193 - protein, 9 aa, Homo sapiens
STCSLPCRG

SEQ ID NO: 5194 - protein, 9 aa, Homo sapiens
TIIKGKRRT

SEQ ID NO: 5195 - protein, 9 aa, Homo sapiens
TPRLQDLGH

SEQ ID NO: 5196 - protein, 9 aa, Homo sapiens
TQAHLPKCP

SEQ ID NO: 5197 - skipped

SEQ ID NO: 5198 - protein, 9 aa, Homo sapiens
VATGHLLRS

SEQ ID NO: 5199 - protein, 9 aa, Homo sapiens
VQPNGLGGN

SEQ ID NO: 5200 - protein, 8 aa, Homo sapiens
APPISLAS

SEQ ID NO: 5201 - protein, 8 aa, Homo sapiens
CGKPLHLH

SEQ ID NO: 5202 - protein, 8 aa, Homo sapiens
CLITWLTN

SEQ ID NO: 5203 - protein, 8 aa, Homo sapiens
EALTGQGM

SEQ ID NO: 5204 - protein, 8 aa, Homo sapiens
EARGNGPG

SEQ ID NO: 5205 - protein, 8 aa, Homo sapiens
FADKPRPN

SEQ ID NO: 5206 - protein, 8 aa, Homo sapiens
FYLSRVYP

SEQ ID NO: 5207 - protein, 8 aa, Homo sapiens
GAPYSETH

SEQ ID NO: 5208 - protein, 8 aa, Homo sapiens
GFLLHQRR

SEQ ID NO: 5209 - protein, 8 aa, Homo sapiens
GGGHLEEV

SEQ ID NO: 5210 - protein, 8 aa, Homo sapiens
GGPRPCWT

SEQ ID NO: 5211 - protein, 8 aa, Homo sapiens
GLLRNTQQ

SEQ ID NO: 5212 - protein, 8 aa, Homo sapiens
HHPWEPDL

SEQ ID NO: 5213 - protein, 8 aa, Homo sapiens
HLRHPLLL

SEQ ID NO: 5214 - protein, 8 aa, Homo sapiens
KDPCPETG

SEQ ID NO: 5215 - protein, 8 aa, Homo sapiens
LHPPFPCL

SEQ ID NO: 5216 - protein, 8 aa, Homo sapiens
MEAGAGQW

SEQ ID NO: 5217 - protein, 8 aa, Homo sapiens
MEKDFQRW

SEQ ID NO: 5218 - protein, 8 aa, Homo sapiens
PAACSPAK

SEQ ID NO: 5219 - protein, 8 aa, Homo sapiens
PCDRHLSK

SEQ ID NO: 5220 - protein, 8 aa, Homo sapiens
PDPALQPG

SEQ ID NO: 5221 - protein, 8 aa, Homo sapiens
PDRRPSAH

SEQ ID NO: 5222 - protein, 8 aa, Homo sapiens
PDTLLRTA

SEQ ID NO: 5223 - protein, 8 aa, Homo sapiens
PDTMSGYF

SEQ ID NO: 5224 - protein, 8 aa, Homo sapiens
PGHPPRPH

SEQ ID NO: 5225 - protein, 8 aa, Homo sapiens
PPAGEPAH

SEQ ID NO: 5226 - protein, 8 aa, Homo sapiens
PPTARATH

SEQ ID NO: 5227 - protein, 8 aa, Homo sapiens
PSPQPCSW

SEQ ID NO: 5228 - protein, 8 aa, Homo sapiens
QGRPGPEW

SEQ ID NO: 5229 - protein, 8 aa, Homo sapiens
QQPLRLRP

SEQ ID NO: 5230 - skipped

SEQ ID NO: 5231 - protein, 8 aa, Homo sapiens
RDGQQSEV

SEQ ID NO: 5232 - protein, 8 aa, Homo sapiens
RISGNIRL

SEQ ID NO: 5233 - protein, 8 aa, Homo sapiens
RPASQQVS

SEQ ID NO: 5234 - protein, 8 aa, Homo sapiens
RTTRAVSV

SEQ ID NO: 5235 - protein, 8 aa, Homo sapiens
SGAHRGEA

SEQ ID NO: 5236 - skipped

SEQ ID NO: 5237 - protein, 8 aa, Homo sapiens
STQPLHYQ

SEQ ID NO: 5238 - protein, 8 aa, Homo sapiens
TGDPKLPW

SEQ ID NO: 5239 - protein, 8 aa, Homo sapiens
TGPPSTSS

SEQ ID NO: 5240 - protein, 8 aa, Homo sapiens
TPRGRLLQ

SEQ ID NO: 5241 - protein, 8 aa, Homo sapiens
TPRRGASV

SEQ ID NO: 5242 - protein, 8 aa, Homo sapiens
TQAPATRY

SEQ ID NO: 5243 - protein, 8 aa, Homo sapiens
VEVLPTFF

SEQ ID NO: 5244 - protein, 8 aa, Homo sapiens
WIFEATSP

SEQ ID NO: 5245 - protein, 99 aa, Homo sapiens
CRPRVTPGPPPCRPRVTPGPPPCRPRVTPGPPPCRPRVTPGPPPCRPRVTPGPPPCRPRVTPAPPPCRPRVTPGPPPCRPRVTPAPPPCRPRVTPGPPP

SEQ ID NO: 5246-5247 - skipped (2 entries)

SEQ ID NO: 5248 - protein, 94 aa, Homo sapiens
QSSPFLARSWNTMQWNNKKMAMTVIAGAHHCQYKLTYTKVWKMNWKKMMIGSQHLLFEAWLLLLLSPLDSSPLQLLLHPHGKRCNPCCRLTWMS

SEQ ID NO: 5249 - protein, 88 aa, Homo sapiens
CRPRVTPGPPPCRPRVTPGPPPCRPRVTPGPPPCRPRVTPGPPPCRPRVTPAPPPCRPRVTPGPPPCRPRVTPAPPPCRPRVTPGPPP

SEQ ID NO: 5250 - protein, 88 aa, Homo sapiens
HHLVPLFIWTPWRKSGSGSGLNAWNGFSNLVRLMGPWHLCMGLKSWISVPCPNLLPAPSALVLLAPATPPFGLIPRLPTGLYCFPSSD

SEQ ID NO: 5251 - protein, 84 aa, Homo sapiens
RGGHGPVNASSAPDTSPPRHPRRWVSQQRQRLWRQFRVGGGFPPPPPSRPPAVLLPLLRLACAGDPGATRPGPRRPARRPRGEL

SEQ ID NO: 5252 - skipped

SEQ ID NO: 5253 - protein, 83 aa, Homo sapiens
RGTRTRQRLQRPRHLPTPPPPEMGFPATTAALEAVSSGRRISPSSPLQAPRCASPASPSRLRWRPRGHPPGPPTPGPQAPWRI

SEQ ID NO: 5254 - protein, 83 aa, Homo sapiens
RPPMTTWPRMRMTLRSAPSTAPSWARGSLPGPARARPTTPLCLSRRGRPLPWRTTCSSRPRVGASRPAPHRPQRSSRRYSRSA

SEQ ID NO: 5255 - protein, 82 aa, Homo sapiens
PTSSTFCSSTGPTAGFSGPAALSFHYDATCATPCASSPACPAAATDGRTLCRPHPTLPAAARIRSQLLKTFSVQTPTDKNYR

SEQ ID NO: 5256 - protein, 80 aa, Homo sapiens
PWTPWPLTVPQPTNSSLNDARGSARQRAPRRGGPKPCHCGSCSGQPPAQCQPTARPRHPPASRPHSPEPRHGHPCATSTV

SEQ ID NO: 5257 - protein, 77 aa, Homo sapiens
CRPRVTPGPPPCRPRVTPGPPPCRPRVTPGPPPCRPRVTPAPPPCRPRVTPGPPPCRPRVTPAPPPCRPRVTPGPPP

SEQ ID NO: 5258 - protein, 75 aa, Homo sapiens
PTNGAPSVWYSWCLCRASHLQCALGTPSCPSLTLQFHMYLWALGMGPRASTCSILVYCSPTSFASSLHWESCSPT

SEQ ID NO: 5259 - protein, 73 aa, Homo sapiens
HQPVHRRPGLQGSWWAEQSGGKDREGGRREGGENGEGRSGGGGGKHQRGRREGERGGGGRGRREGGEGDRKGG

SEQ ID NO: 5260 - protein, 73 aa, Homo sapiens
QHPQCPDAEWNDQTGAWDRDSPASAPHSSPIATLASPGSALPGPWFLASQHCPCPDTALAPARCPLPRPPAGQ

SEQ ID NO: 5261 - protein, 73 aa, Homo sapiens
RRGTSQRAQSGPLSFVLHFLAKDPHPMFLCTPRAHPLARPQGHLLAHPGPSPTWPGPLPLPQTRLDLSAGPTA

SEQ ID NO: 5262 - protein, 71 aa, Homo sapiens
PTSSLAWRSRNATSSSPSSWWSWNPSTSSISRRPWHSSTSTRNGYASTSPIWIWSSCSPSSAIWINPQKAL

SEQ ID NO: 5263 - protein, 70 aa, Homo sapiens
PTPRFAPFGGPSCSARSRGRTTPCTPSPGSTGPWWWGSWGPRPGRSYCWSQTQESQQAGGGLRGAHSPQS

SEQ ID NO: 5264 - protein, 67 aa, Homo sapiens
PTPISGRHAPGGRLPALSLLAAVPGQRCPTCQEQGAQRQLHEAGSGPRAPVGPAWLTPAQCRTYQCH

SEQ ID NO: 5265 - protein, 66 aa, Homo sapiens
CRPRVTPGPPPCRPRVTPGPPPCRPRVTPAPPPCRPRVTPGPPPCRPRVTPAPPPCRPRVTPGPPP

SEQ ID NO: 5266 - skipped

SEQ ID NO: 5267 - protein, 63 aa, Homo sapiens
RRPRPQRRRHQARHYGQRRRERWPGRPHIGGACRRGQEGHRNEGFGNSKMVQCKERIWFHQQE

SEQ ID NO: 5268 - protein, 61 aa, Homo sapiens
HPVRPPPPNVRAWVGQQPPMPLGRPLGLEGQGARLIPPVSLKGFWDPRPTGKGLEGGRHRT

SEQ ID NO: 5269 - protein, 60 aa, Homo sapiens
QLPMQRHLPLVLGRPHPWLRLLPMSSPQLRGLPRQVQLPRQPPATRGSSGFPTRVWNPWS

SEQ ID NO: 5270 - skipped

SEQ ID NO: 5271 - protein, 58 aa, Homo sapiens
PAPRRILLRYQARASTTARTQTPTASACLPSPCWGGPGPRDPWRRPPALAPTAQSRSP

SEQ ID NO: 5272 - protein, 58 aa, Homo sapiens
PWTPWPLTVPQPTNSSLNDARGSARQRAPRRGGPRHPPASRPHSPEPRHGHPCATSTV

SEQ ID NO: 5273 - protein, 57 aa, Homo sapiens
HLTTKGEGWVHQWGVTVGAQVATAPSMGTPHPLPHHPSMALTPTALCSWSMAWINLR

SEQ ID NO: 5274 - protein, 57 aa, Homo sapiens
RRPPPGSQQYRTQPDHPSALITTSDHCQRPQDHRVARADGAPHGTLPCTQPGGVRLW

SEQ ID NO: 5275 - protein, 56 aa, Homo sapiens
LRPGPGSGFSPPPPWPAWPSSAEGCSPRAWSSTLLPTTTQCVKVTTPPSAASSTST

SEQ ID NO: 5276 - protein, 56 aa, Homo sapiens
PTSLRREKDGSTSGGSPSGPKSLRPPVWAPPTPSPTTRVWPSRRQPCAHGLWLGSI

SEQ ID NO: 5277 - protein, 56 aa, Homo sapiens
PVPPLQCLLSCLGPSPDDASSTTFPATSAAAATADSIPKGPPAGPRVHQALKSSTH

SEQ ID NO: 5278 - protein, 55 aa, Homo sapiens
CRPRVTPGPPPCRPRVTPAPPPCRPRVTPGPPPCRPRVTPAPPPCRPRVTPGPPP

SEQ ID NO: 5279 - protein, 53 aa, Homo sapiens
PEACGFSHAEPSREAATRAEVHGSPEHHRCRGWWLPCTHPTGLGDGPAQPEIP

SEQ ID NO: 5280 - protein, 51 aa, Homo sapiens
PGGLQPQQARPQDQPAAVHAECGGEDALETPVRLALLPARGRNQIEPAGLS

SEQ ID NO: 5281 - protein, 50 aa, Homo sapiens
QGQARDLRCPLTAPLACLHLPSPPVRSTVCAMDSLRPVRLQKYPQAAAVP

SEQ ID NO: 5282 - protein, 49 aa, Homo sapiens
GRSLPAGPSALPSPPSPSRRRAPPRSGRGSLRKWRPGASRRWRMSTWPS

SEQ ID NO: 5283 - protein, 48 aa, Homo sapiens
GAPRSPSSVAGSSSATWQSGAMWVQPPWEQLPGGSCTLRMGLMSTTAS

SEQ ID NO: 5284 - protein, 48 aa, Homo sapiens
PSNRFNGEKVGFRCVHLLRHPWTVFNFADGKTSTRSTSATSQGSDWNK

SEQ ID NO: 5285 - protein, 47 aa, Homo sapiens
LGGPGSALQAPWTRARLPPAARPLPEADSLGPPLQHGPEEGSRERLG

SEQ ID NO: 5286 - protein, 47 aa, Homo sapiens
LPQPCGPASCSTPSWPMAVPLAASRASPTSRSCMARSPRPSACQLPR

SEQ ID NO: 5287 - protein, 47 aa, Homo sapiens
PPPPSAPPTPSPALRAAAQGAVARAASHRRRLPAGTRRSSQRRFWEQ

SEQ ID NO: 5288 - skipped

SEQ ID NO: 5289 - protein, 46 aa, Homo sapiens
RKLPQMPPSSMTKHLSGCRARGTEGEKKSTLWRSKVMTSSVGPSNG

SEQ ID NO: 5290 - protein, 45 aa, Homo sapiens
HAGACTEEIAILMRLTSPNASVLAATPENIVKWRFQKASLQEQPQ

SEQ ID NO: 5291 - protein, 44 aa, Homo sapiens
CRPRVTPAPPPCRPRVTPGPPPCRPRVTPAPPPCRPRVTPGPPP

SEQ ID NO: 5292 - protein, 44 aa, Homo sapiens
RAEVSQRALLHSPVPRLPRAGGHRPDLEEAVSGSGGRGHPDGGG

SEQ ID NO: 5293 - protein, 43 aa, Homo sapiens
QSAMSIMTRRSLWRAARRRQTAWMSWSMRRWSCIKAATGTSWA

SEQ ID NO: 5294 - protein, 42 aa, Homo sapiens
HEWSSPAPSPLATPLPTLGTPKTGRYGSRLFPLLQSLLPQLL

SEQ ID NO: 5295 - protein, 42 aa, Homo sapiens
HHLRYLHLSLMQKSHLIKNNLQLPWKPLRDLVGHSPRAYVAI

SEQ ID NO: 5296 - protein, 42 aa, Homo sapiens
LPHFHLPHPSKAPSHHLHLYLWLPLFPIQCLTAQPSPLRGRQ

SEQ ID NO: 5297 - protein, 42 aa, Homo sapiens
PCARGPAPASRRRRPGRLGRHQPRAALPEPGVQLSCRQLHSV

SEQ ID NO: 5298 - protein, 42 aa, Homo sapiens
PTTTAGLRARDQQQPAQPDAPELSRCPEPYGHEPARPAAPVP

SEQ ID NO: 5299 - protein, 42 aa, Homo sapiens
QHQRPGPGGARRRGRQDGGRGRRRPPGPDHRGPEGRQQSGVR

SEQ ID NO: 5300 - protein, 41 aa, Homo sapiens
PWGEAAGGSLHLVLRPLQQVGGCPGRTAPEKDGAEAPPCVQ

SEQ ID NO: 5301 - protein, 40 aa, Homo sapiens
ARSASCCAQWQARCRARWHCGGWASAGRAEGALRQRSARC

SEQ ID NO: 5302 - protein, 40 aa, Homo sapiens
HPQSHLHPLGLPHLPHPHCQPEEPRGPATTRAPCQDWPLP

SEQ ID NO: 5303 - protein, 40 aa, Homo sapiens
NPHFRPPRTWRATTSAQLARCSPWATLPHMPRARSSTAAA

SEQ ID NO: 5304 - protein, 40 aa, Homo sapiens
PTGAHPPSTITPTACRPPSGQGPGSQGRGQPQFCSSILTD

SEQ ID NO: 5305 - protein, 39 aa, Homo sapiens
RRPATPPRPSRRGPEAEAEAAPASPLRARPAPRPTAPST

SEQ ID NO: 5306 - protein, 38 aa, Homo sapiens
HNPRHQTSVLSFTTANTVPTAIGQLWECLSTTRKDTQK

SEQ ID NO: 5307 - skipped

SEQ ID NO: 5308 - protein, 38 aa, Homo sapiens
PEPQGAPHQWLALLPLHGNRGLCGCSHRGSSCLVVPVR

SEQ ID NO: 5309 - protein, 38 aa, Homo sapiens
PSDPRPSPSRHHVLPGSDPGVSVCLQVAADPSEWNPDK

SEQ ID NO: 5310 - protein, 38 aa, Homo sapiens
TCSPQSLLSSWRSTQPHVPPSTLWGVRMTSLSASTSLW

SEQ ID NO: 5311 - protein, 37 aa, Homo sapiens
APSPWLPAVPHTARPPLRPHHDLGPLPASPGPPCGPC

SEQ ID NO: 5312 - protein, 35 aa, Homo sapiens
HPAARSSSCCPASPHSPGASPMSLSWGTALMTSPR

SEQ ID NO: 5313 - protein, 34 aa, Homo sapiens
PSASPGHDFQEGAGGVSRGLPLAEDLLGVLAVFG

SEQ ID NO: 5314 - protein, 33 aa, Homo sapiens
CRPRVTPGPPPCRPRVTPAPPPCRPRVTPGPPP

SEQ ID NO: 5315 - protein, 33 aa, Homo sapiens
LPRAGPGLPGGGRPHELLPATSGSRPEPPAGRG

SEQ ID NO: 5316-5317 - skipped (2 entries)

SEQ ID NO: 5318 - protein, 32 aa, Homo sapiens
VAEEAAASRWKQSQQSLSLQQWKRPMGLSRPE

SEQ ID NO: 5319 - protein, 31 aa, Homo sapiens
PSPAPSARLPPTQAEKRFPYTEKARPMEISV

SEQ ID NO: 5320 - protein, 31 aa, Homo sapiens
PSPTSTSPTHQRPLPTTSTSTSGCPSSPFSA

SEQ ID NO: 5321 - protein, 31 aa, Homo sapiens
QQVPGAAAPAAAALMKTGPSWMEAWNQMGPT

SEQ ID NO: 5322 - protein, 30 aa, Homo sapiens
AFSGRILHQPEMAAMRLMPKFLNSTNSWWT

SEQ ID NO: 5323 - protein, 30 aa, Homo sapiens
HHHHPHRSLASPCPHRCPHRRPHPLQPTLL

SEQ ID NO: 5324 - protein, 30 aa, Homo sapiens
QPRSLRTTPPHTSGEKVSLHGKGAADGNLR

SEQ ID NO: 5325 - protein, 29 aa, Homo sapiens
PASPSGPRGVPGLCTDGSSRLRDAPSADN

SEQ ID NO: 5326 - protein, 29 aa, Homo sapiens
PNSQCRGTSPWSWAGLIRGSVFYQCRVLS

SEQ ID NO: 5327 - protein, 29 aa, Homo sapiens
PPPPPAAPAAARPFGREEEPPLEKLQVDD

SEQ ID NO: 5328 - protein, 28 aa, Homo sapiens
VGRSGWGVPASCTAAPPTSRWMSWQDCS

SEQ ID NO: 5329 - protein, 27 aa, Homo sapiens
PPPGWLPRLTRERAAAALRAVGTQISI

SEQ ID NO: 5330 - protein, 27 aa, Homo sapiens
QRTPWGHGFAGAPFPISKPHGPPAGQL

SEQ ID NO: 5331 - protein, 27 aa, Homo sapiens
RLPLRPQRGPRPLHRWLQQTTGCSQRR

SEQ ID NO: 5332 - protein, 27 aa, Homo sapiens
SLFLPGSTPSLHFLCWSLRSSGGCRSA

SEQ ID NO: 5333 - protein, 26 aa, Homo sapiens
PRALLRVCCHRGGPRSRTFHPPPCGV

SEQ ID NO: 5334 - protein, 26 aa, Homo sapiens
TTTTSSPRRSPALRARGGTTIGEVTS

SEQ ID NO: 5335 - protein, 25 aa, Homo sapiens
HLLHLLLLHRSNCRFLWTCRSFLPL

SEQ ID NO: 5336 - protein, 25 aa, Homo sapiens
LTTGHLLAPKICHLHPGAWVTLNSW

SEQ ID NO: 5337 - protein, 25 aa, Homo sapiens
PRARPGTCAARSQLPWPASTCPLPQ

SEQ ID NO: 5338 - protein, 25 aa, Homo sapiens
PSLLQIPDGFSQTNCRLSRCCAFLR

SEQ ID NO: 5339 - protein, 25 aa, Homo sapiens
RRTCLGPPNERKGRQGMSLPPQGKR

SEQ ID NO: 5340 - protein, 24 aa, Homo sapiens
PRAREAEGEEAAAEGLAESHRGQI

SEQ ID NO: 5341 - protein, 24 aa, Homo sapiens
PTRSQGVPVLHQEPAQRRPPPAAP

SEQ ID NO: 5342 - protein, 23 aa, Homo sapiens
PGPRARAPPAPAPGRGVAPGGGG

SEQ ID NO: 5343 - protein, 23 aa, Homo sapiens
QSQGSRRGRGGGGGAGGESQRAN

SEQ ID NO: 5344 - protein, 23 aa, Homo sapiens
RRSPTPASPAARPTSCSTCRMWW

SEQ ID NO: 5345 - protein, 22 aa, Homo sapiens
PACTSKAWTPRKLVGRAVRRKG

SEQ ID NO: 5346 - protein, 22 aa, Homo sapiens
PQPGNQRSNRSLPGTTRMRHRV

SEQ ID NO: 5347 - protein, 22 aa, Homo sapiens
PSPAPSWHGAGTLCSGTTRKWL

SEQ ID NO: 5348 - protein, 22 aa, Homo sapiens
PTQPQGLPAAAQLPHTHPEQVP

SEQ ID NO: 5349 - protein, 21 aa, Homo sapiens
PTTSFPFLSGLPGGKAEAAAV

SEQ ID NO: 5350 - protein, 20 aa, Homo sapiens
HHHRRAPGQGSATASPARCT

SEQ ID NO: 5351 - protein, 20 aa, Homo sapiens
LQDGSLDRNLGSPLMSEFRK

SEQ ID NO: 5352 - protein, 19 aa, Homo sapiens
PGWHLPRQGQHAEPRPRPW

SEQ ID NO: 5353 - protein, 19 aa, Homo sapiens
TALGATIPSRPRSAAALRT

SEQ ID NO: 5354 - protein, 18 aa, Homo sapiens
HLLLSLHPSLPKLPQNPL

SEQ ID NO: 5355 - protein, 18 aa, Homo sapiens
HPSLATRDQTGACLARPG

SEQ ID NO: 5356 - protein, 18 aa, Homo sapiens
HQMKCLTAVDCLQAFWDM

SEQ ID NO: 5357 - protein, 18 aa, Homo sapiens
PCLLPGQVLGGPELGPKW

SEQ ID NO: 5358 - protein, 18 aa, Homo sapiens
PCRGDGPVPCPRRPAPAQ

SEQ ID NO: 5359 - protein, 18 aa, Homo sapiens
PVSSFQDRLPPCISSAGA

SEQ ID NO: 5360 - protein, 17 aa, Homo sapiens
LDPMAPHRSPTNKLLPQ

SEQ ID NO: 5361 - protein, 17 aa, Homo sapiens
LQLWELRFHQDRGQRLP

SEQ ID NO: 5362 - protein, 17 aa, Homo sapiens
PGGRAWAPQTKGKGGRE

SEQ ID NO: 5363 - protein, 16 aa, Homo sapiens
ADSVGTWLRWCPFPHI

SEQ ID NO: 5364 - protein, 16 aa, Homo sapiens
PEPPQKLHQKQLQNFL

SEQ ID NO: 5365 - protein, 16 aa, Homo sapiens
RGDHRSNQNREWCLEE

SEQ ID NO: 5366 - protein, 16 aa, Homo sapiens
TLMMSNGCWGWQQSWE

SEQ ID NO: 5367 - protein, 15 aa, Homo sapiens
CAPAPVPAQLPRALT

SEQ ID NO: 5368 - protein, 15 aa, Homo sapiens
GPQERARAARMMRAQ

SEQ ID NO: 5369 - protein, 15 aa, Homo sapiens
LHSPEESSISPKWRP

SEQ ID NO: 5370 - protein, 15 aa, Homo sapiens
PFKMEAWTETLEALL

SEQ ID NO: 5371 - protein, 15 aa, Homo sapiens
RAPPKTAPETAAKFL

SEQ ID NO: 5372 - protein, 14 aa, Homo sapiens
PLYCGPRPPLDCFQ

SEQ ID NO: 5373 - protein, 14 aa, Homo sapiens
PSKCQAPPLPPPPH

SEQ ID NO: 5374 - protein, 14 aa, Homo sapiens
PSLLQIPDGFSQTN

SEQ ID NO: 5375 - protein, 14 aa, Homo sapiens
SPCWAWTPGGWAAS

SEQ ID NO: 5376 - protein, 14 aa, Homo sapiens
STGRLTARRMPPCL

SEQ ID NO: 5377 - protein, 13 aa, Homo sapiens
HTSWNFRPLNWRS

SEQ ID NO: 5378 - protein, 13 aa, Homo sapiens
PGEEPPRGHRAAP

SEQ ID NO: 5379 - protein, 13 aa, Homo sapiens
QEADAKRQRQWQW

SEQ ID NO: 5380 - protein, 12 aa, Homo sapiens
PMQVHARRKLLF

SEQ ID NO: 5381 - protein, 12 aa, Homo sapiens
PTSARTKLGCWA

SEQ ID NO: 5382 - protein, 11 aa, Homo sapiens
CRPRVTPGPPP

SEQ ID NO: 5383 - protein, 11 aa, Homo sapiens
MPSSWSSSGRT

SEQ ID NO: 5384 - protein, 11 aa, Homo sapiens
PGNCPRCLLHR

SEQ ID NO: 5385 - protein, 11 aa, Homo sapiens
RGRRRGPGLRG

SEQ ID NO: 5386 - protein, 11 aa, Homo sapiens
RTARGVTARSP

SEQ ID NO: 5387 - protein, 10 aa, Homo sapiens
PAVSSPYSCV

SEQ ID NO: 5388 - protein, 10 aa, Homo sapiens
PTTPATRPQY

SEQ ID NO: 5389 - protein, 10 aa, Homo sapiens
PTTSATSTSP

SEQ ID NO: 5390 - protein, 10 aa, Homo sapiens
PVPPLHPPLL

SEQ ID NO: 5391 - protein, 9 aa, Homo sapiens
HPHRAGCHV

SEQ ID NO: 5392 - protein, 9 aa, Homo sapiens
HRLLGPSRW

SEQ ID NO: 5393 - protein, 9 aa, Homo sapiens
LILWPQAAP

SEQ ID NO: 5394 - protein, 9 aa, Homo sapiens
PRCSPAWNL

SEQ ID NO: 5395 - protein, 9 aa, Homo sapiens
PSIYQRQKT

SEQ ID NO: 5396 - protein, 9 aa, Homo sapiens
PTQVGTSDP

SEQ ID NO: 5397 - protein, 9 aa, Homo sapiens
RTPTSPAAT

SEQ ID NO: 5398 - protein, 8 aa, Homo sapiens
GSVWILPC

SEQ ID NO: 5399 - protein, 8 aa, Homo sapiens
LHLCQPLR

SEQ ID NO: 5400 - protein, 8 aa, Homo sapiens
PGEGHHHQ

SEQ ID NO: 5401 - protein, 8 aa, Homo sapiens
RPPPAGSC

SEQ ID NO: 5402 - protein, 77 aa, Homo sapiens
PTTPGACGTLSHPVYCGHEFGTGRAVPRITVPAPAPPRGPPHSARILFAVRVPISATSPSETPAPAPSTPAGFHPPV

SEQ ID NO: 5403 - protein, 54 aa, Homo sapiens
PWAWRHTLPGCQCRTCGLREPALPQGSAQLPGPAVPGTRPAEPQEERPADSRGG

SEQ ID NO: 5404 - protein, 28 aa, Homo sapiens
LPGGIASRFPASWPRTPAACHPSLRTGT

SEQ ID NO: 5405 - protein, 24 aa, Homo sapiens
PAVFASSRPTSPASCRRPPSSWWR

SEQ ID NO: 5406 - protein, 23 aa, Homo sapiens
PCRPRVTPAPPPCRPRVTPGPPP

SEQ ID NO: 5407 - protein, 18 aa, Homo sapiens
PHPRNKQGNFRGRPLLCS

SEQ ID NO: 5408 - skipped

SEQ ID NO: 5409 - protein, 12 aa, Homo sapiens
LGLEAHTARVPV

SEQ ID NO: 5410 - protein, 11 aa, Homo sapiens
ECCSSWLRRIE

SEQ ID NO: 5411 - protein, 9 aa, Homo sapiens
HHPRCLRDA

SEQ ID NO: 5412-5413 - skipped (2 entries)

SEQ ID NO: 5414 - protein, 99 aa, Homo sapiens
GTASAFSVPAFRNSCSHPPTPHHCSWLHLPGPWFDTYCTVGSDKQFSKFSQKESFLHGRARRYGLQLWKLQLWPTEIYTESYVQNARQQHFKHKSGEWL

SEQ ID NO: 5415 - protein, 99 aa, Homo sapiens
VPAPPPGPGWAPAAASTAAAATSAAAVAAVAAVAAGGGRGGPGLLQPQHHPPRPPLPQQARHRAHRHQPHALPHPRRPRRDHIHLWEGGSAHHLHVAPQ

SEQ ID NO: 5416 - protein, 99 aa, Homo sapiens
VRRRRRPAQTCCGQIPGIPFSSLHAWNLRAWRTCWSPAPTPPPTWSRTSRSPDTRACNLCTCPSFIPTTTLASPTWRRTTSASTASLRCIWRGLGSINT

SEQ ID NO: 5417 - protein, 98 aa, Homo sapiens
AAAAGGPAAAGGAAELQEETGRGTPGGEAAVAPQEDERGGWPRRRPWQEGPGRERSAERTREEGSAGAQSGEESAEAGHGREEHARQTSTWQGGQRLL

SEQ ID NO: 5418 - protein, 98 aa, Homo sapiens
GALQPASPVRGARAGRLPRVRLAAAQPRAAPREHQVADLEQTAAQGGAQHQPRGGEAAAAQGAAAAADPGPTRLPGRRAAARGLPGGGRVPRHHRDRH

SEQ ID NO: 5419 - protein, 98 aa, Homo sapiens
GKMILLLQEWSRAISGGIAKRRRLHGMTRKRINRDGVMDKNQAKGGLFLPVITGEKLQGITIGVRPIRNPAQEVVTVTGPFPVGTNLVKLVLSLGETT

SEQ ID NO: 5420 - skipped

SEQ ID NO: 5421 - protein, 98 aa, Homo sapiens
SGARETRGPRAPPGACPACPLRASRRCCPPSSSTLERVSPGGAGRLASSAPTWGCLCRAPPSRPSGRPRPDPALSLEAHTCWQRRTAAPGQPGRHRQG

SEQ ID NO: 5422 - protein, 97 aa, Homo sapiens
ASAAGGDQRRHAAARSQGYLFPHSTHGIFEPGERAGALRLRPHLRGQGLPDRQIPGPAICVPVLRLSQRLHSPHPHGDGQQVLLPRVSAVSGEVWVL

SEQ ID NO: 5423 - skipped

SEQ ID NO: 5424 - protein, 96 aa, Homo sapiens
LVWAQPGMALWHGPLAPYPLPAPCPALWMHPQQTVAAGWVPTGESGPPSAKGSYWSWRGRLQHGPTPTSAPMSTWPGSLAFLRPRYRCGSRSAGPK

SEQ ID NO: 5425 - protein, 95 aa, Homo sapiens
CPLASTPPPPGAPATPRGRPAAEGLRPTPPMPMAMVTRRRAAVTIETGCCTWAPEPRWRMLYLCTSHPGGSARIVVSSAPFAPSLWLLTRWKCTL

SEQ ID NO: 5426 - protein, 94 aa, Homo sapiens
AVRHPGLAGAGARAGGRRAAAGAAGGDPGLGSSPGGGARRRCWRSSGRCRARCSSRRAGTRRSSPNTWLTSATSSATSVAATAGMESISHSLLC

SEQ ID NO: 5427 - protein, 94 aa, Homo sapiens
GPGLPLAGAALPRALQRRGLLPGLQCLWLCGQAQAGVAAPAAHPQLCGGLLPLGEGHGCVAGRVPAPAERLLQPLLGPAGNGGQPAQRPGRQLL

SEQ ID NO: 5428 - protein, 94 aa, Homo sapiens
PHAQVHGPSVPHPAQPAAPESQGPHLPHRWLPRVPDSRGAAGPLGFPAQPCAPAPAAARRPLAPQRPPRRDPPLLPASRPLPGGAEHRPRRRRG

SEQ ID NO: 5429 - protein, 94 aa, Homo sapiens
TLHHPTRMAVLRTGQINPPTPGLGSTAPPQGFCRKTWAGLWGAQPPATGACAARRSDTTRCFSGTRSSTPAPSPSSAQSAGRPSSKAPSCCGTS

SEQ ID NO: 5430 - skipped

SEQ ID NO: 5431 - protein, 93 aa, Homo sapiens
STITLGFGWMLILGKDTAEPSPRAPRTTARSCRLRRTSSLIRWRCGRLETPQRSSWPRATRASWMRTLRPRPCWRSVGIRATAKGSGKSRTMN

SEQ ID NO: 5432 - protein, 93 aa, Homo sapiens
VSTGGSGRAFRPAALSGRRRRRRSQTGLSAAGQVPGLDQPAVSRPTARPPPAPALPAGLCPSAPAGTSRSRGPPGCRRRLRSASGARRRNRSL

SEQ ID NO: 5433 - protein, 92 aa, Homo sapiens
QCCCCCGAGVGVLRPSSPPSLARRPLLPGVSTTSSQMWWRRQHLPWSISRSWTGTLSWAARSLSRTAQDSWWLPMGSLSPTPMWWLIGAESV

SEQ ID NO: 5434-5435 - skipped (2 entries)

SEQ ID NO: 5436 - protein, 91 aa, Homo sapiens
GQELQHEAAAEEHFPQRPGQGGSDHRGLDHHRGVPHRRHEAGRRGGAGLQPEQQLQGRRAHHHRSRHLGHCPPPRGPDPSHGQLPRRVHTG

SEQ ID NO: 5437 - protein, 90 aa, Homo sapiens
GRLGGRQRRRHPPGRATFGYGEGGLGPARDRGRGGRRGDWRKRRRKPPVHPHARLPEGRAAAAHWRRGPRRHRDPREAAFLRAHPPRGAA

SEQ ID NO: 5438 - protein, 90 aa, Homo sapiens
QEATSTTWTTYCRRRGNRPWSRSERGCFCRSVSISTPWILMKRKCHSHPSTGCWWKSTQCPCRPSRRSIQVRLCFCPGVTPCHASWTPHS

SEQ ID NO: 5439 - protein, 90 aa, Homo sapiens
RRWRRRRRPKRRRRKRASSCRLCRRPRVRRRRRPGPGRAQRLRELRARDPRASPGRPPRPLPNRPRASASRPSRWRASARRCSRRATPAA

SEQ ID NO: 5440 - protein, 89 aa, Homo sapiens
GEAAAAGRPSLAAPPGTATATRRSTTGRSRGPGAWPATRSRGPDPCRRPRRRCRPRARWTPCRSAVAWTADSEPLSAGSASRARSRGSS

SEQ ID NO: 5441 - protein, 89 aa, Homo sapiens
TGGRRMTRRTMTTTKMMMMRRTKRRRRKRRRMTMMTRRTLLTKKTCLTPRTSAATKALPRQTISQRRPIQTPPGTSLTPSRLAVLAIWG

SEQ ID NO: 5442 - protein, 89 aa, Homo sapiens
TPPVARMGRSPAAGCGAAATSKPWGMRRAETQTAAPRHLPKQSPDASPPVAPPAWTRPGSTAVSHPGSTPGAPSLATAVPSPLDSSAMS

SEQ ID NO: 5443 - skipped

SEQ ID NO: 5444 - protein, 88 aa, Homo sapiens
LRSDTQGWPGRGRARGAAGRPLGPRAGTRASGPRLEAAREGAAGAALGAAGRGAAHGAQVPGEVHPIHGSRPQLRRRPRWRPPQGWRA

SEQ ID NO: 5445 - skipped

SEQ ID NO: 5446 - protein, 86 aa, Homo sapiens
LVHLGPKVRVVIQVLRALEASRVPLVQRENLEKGVVQVQMEEEECQENLGQREIEGLMDFRVCQVTKVTGVNEVLKVLQVLLVMME

SEQ ID NO: 5447 - protein, 86 aa, Homo sapiens
RRMTRRTMTTTKMMMMRRTKRRRRKRRRMTMMTRRTLLTKKTCLTPRTSAATKALPRQTISQRRPIQTPPGTSLTPSRLAVLAIWG

SEQ ID NO: 5448 - protein, 86 aa, Homo sapiens
SLRAHPWLSAPGCNCAPSLPDFSPLHPQCGISLVPRGTPLDLWTSRPGQEAATRNPRPLLLKFTASVVVPDSSPAPGTTSTWGGAF

SEQ ID NO: 5449 - protein, 85 aa, Homo sapiens
GPCRPADLHQPGAPHQPRCVCAGQWAGPIWDPHCPQPRPRPGTHGRHRPPSSASSREQGFCQQPPDPECGQGRFLRAREALRAAV

SEQ ID NO: 5450 - skipped

SEQ ID NO: 5451 - protein, 84 aa, Homo sapiens
DTGGSGLGHKQPEAAGTWTYGGSRGPSLLLSLHGGPGGPGACLTKELPHQSGAGQEPAGRGPVPPGTPYPCQSANLSPKPGQAQ

SEQ ID NO: 5452 - protein, 84 aa, Homo sapiens
GCGCGPAGQYGGAVGLARRGTAGCLPCPPWLCCCCAFPACGLPVTDGWRGWQGSGVVRVSGSAPWAPGFPFSLSCPLCGTQPRW

SEQ ID NO: 5453 - protein, 84 aa, Homo sapiens
RCPGRGPAASATEANCSMVTWLLWALRLLCRQHPPELETRLAVPPAHHLSTSWRRQPPILPLAWAPMPHTSPPTPGTALPPLAP

SEQ ID NO: 5454 - skipped

SEQ ID NO: 5455 - protein, 83 aa, Homo sapiens
PRPRPPPPRSWGCTSLRLPISGSPMTSAWRSLRMKTSRRSLMSVASAYSAKTPCPYGPRAPGCSLRAAAARGAGCRPRCCRWT

SEQ ID NO: 5456 - skipped

SEQ ID NO: 5457 - protein, 82 aa, Homo sapiens
RGAPGAGGRTGAAAAGGGTRPGAAEAPLGGAQGPAAPRAGLRPGPRGGGGAGAFAGAASGNCSSRSEDEGQVSKTPYRPSLF

SEQ ID NO: 5458 - protein, 82 aa, Homo sapiens
RTPASCVRTLTWTWQWSVPIRECSSTKASVARQPPGCSWRSRSTLSLSGGAWSMPRNGPWETPSMSKQNRGLRLIKSSSTKS

SEQ ID NO: 5459 - protein, 81 aa, Homo sapiens
RILSSPSGCGCVVAVWRSSPAAGWAMSSGNGTPTTSLRVMPSPTSGILSALQKCGWMNTSNTTMRPGPRPSGRPSAVWLRG

SEQ ID NO: 5460 - protein, 80 aa, Homo sapiens
AGARPPGNSATTTCPTRWAAATCSRPTWCTTCASAATTCAPGTARTCLWAPGWRRWTSSGSTTRASTPNTGPAAAATSTW

SEQ ID NO: 5461 - protein, 80 aa, Homo sapiens
RVAVKKAGRAQPVIREPATPAVPSTGPARMASVNAARAGMESTALSRVVLVCATAMEDVPWTKMAGIVCASLDGEEQAVT

SEQ ID NO: 5462 - protein, 80 aa, Homo sapiens
VCFPAFSLVGQHLLVLPRGLPCPSLHRTEPNQRLCLALSCGLPLLGDSAHLLDHHLPDLPAPLGCPWGLPLLHHTPGHPL

SEQ ID NO: 5463 - protein, 79 aa, Homo sapiens
GGDTAPSAAPTCPVHLQSVQWHRAQLTARSLPGPYRQRLPVGLPVLLQPPEPTRQRPRPHRLRQLGLHGGRGPVPALSA

SEQ ID NO: 5464 - protein, 79 aa, Homo sapiens
QGARGGPRSGPPSPSPAVAVSLSPPAEGAAFGGVGKQVGLAMGALLHPEAQLGVPLISEPTQGSIPMDRPLAWPSPTTP

SEQ ID NO: 5465 - protein, 79 aa, Homo sapiens
RSTGLTGEQTHWLRPTSGPATMSPWYRGPTPSPLTCRCTTPPASPWLPIPVRPMGARAPAPTCVSSTTTGPCPAPAPTS

SEQ ID NO: 5466 - skipped

SEQ ID NO: 5467 - protein, 78 aa, Homo sapiens
CRWRCLGRSEAMSWHTSGMGGCPGLASSSPASSWPARASPWARAWRQPWKTSGPSSSSSLSCVRCSAGIERCFGRGRD

SEQ ID NO: 5468 - protein, 78 aa, Homo sapiens
PLSGTWGTLRAPSSFHPLVATQALLSQRGHPRTALGGSQPLSATPSRVLPPRRAAAPTQQLPHALLAPSLQDLAKRPP

SEQ ID NO: 5469 - protein, 78 aa, Homo sapiens
RTRLTLTGTRSSGTRASPSAVCLCCWTCPSRSFPAASPSGLRAPVGAQAPPEVTLRASCASSASKACAGLWPWGAQVR

SEQ ID NO: 5470-5471 - skipped (2 entries)

SEQ ID NO: 5472 - protein, 76 aa, Homo sapiens
SWGPAASTAAVSAAAVAGACESLRGQRTAPEPSPDGELPVRPIARAQSMKNFPSAAGRGAPRTGMKARSWRGRRAP

SEQ ID NO: 5473 - protein, 75 aa, Homo sapiens
AVCAGPRHPGRPRLPALGPCTAAVWGMAQPGGPCPGEGFCGSNPLTLRAPGGSASAANLRPRWHEAQHVGPRFLR

SEQ ID NO: 5474 - protein, 75 aa, Homo sapiens
GPRALAAAVQATGLGPPRQRGADGGRGGRLLPGAGGRRRELHQPPRSEPAGPGRRGSRAQGPSGLRPALPSARAG

SEQ ID NO: 5475 - protein, 74 aa, Homo sapiens
AVCAGPRHPGRPRLPALGPCTAAVWGMAQPGGPCPGEGFCGSNPLTLRAPGGSASAANLRPRVWDAITLGIQVM

SEQ ID NO: 5476 - skipped

SEQ ID NO: 5477 - protein, 74 aa, Homo sapiens
RTGRAAGRAGCGSGPHGALLQRSTGFHPFLPTWRPRPHGSVSAAIPLRPAAALLCPRLSPSAPLRLLPHRPGTL

SEQ ID NO: 5478 - protein, 74 aa, Homo sapiens
TWRSSSTRREARSQGLQQPRPRNLSPSTSCRSILLRLSTTRAATTADSSSSMWPVVWSIFSSLSLGPVWHPEGT

SEQ ID NO: 5479 - skipped

SEQ ID NO: 5480 - protein, 73 aa, Homo sapiens
PSSLDRSQSPITMVTNTWLLPLLSSSKARLCATIEWTLMAQDTCWETWKAGSSCCFWRRRNRWMAPSLSRISV

SEQ ID NO: 5481 - skipped

SEQ ID NO: 5482 - protein, 73 aa, Homo sapiens
TWRSSSTRREARSQGLQPRPRNLSPSTSCRSILLRLSTTRAATTADSSSSMWPVVWSIFSSLSLGPVWHPEGT

SEQ ID NO: 5483 - protein, 72 aa, Homo sapiens
EEEVGEVVGEGEEGGGEEEEVVEEVSKAGEIMVEEGVMVEEGAMVEEAMEIHMEEVVVVVVVVVEEVDIEDT

SEQ ID NO: 5484 - protein, 72 aa, Homo sapiens
GPGSAVAAPPAARSHGNGEGRRPQRYTKPGAEKAKPSAAGAQHEAEAGGGGPGHGSGGGRGPGRGLPGAATA

SEQ ID NO: 5485 - skipped

SEQ ID NO: 5486 - protein, 72 aa, Homo sapiens
VPKDHYRYVPADSAAFSAACHPPRLSFPRSGTQSSSGPPPHPPAPGQTGSVGPGHVLLRVLSPAAPGSTGQP

SEQ ID NO: 5487 - skipped

SEQ ID NO: 5488 - protein, 71 aa, Homo sapiens
PGRRRLLLGAARRARGQRVPGGRRAPAHRRRGRAHLRRRRRQGHPLLPRLPARRDRSERGPAETCQRPGFV

SEQ ID NO: 5489 - protein, 70 aa, Homo sapiens
AVCAGPRHPGRPRLPALGPCTAAVWGMAQPGGPCPGEGFCGSNPLTLRAPGGSASAANLRPRVKLASPAV

SEQ ID NO: 5490 - protein, 70 aa, Homo sapiens
DTAGAAASGWGVLGLHPAEGEEEEEEPWRSRRRSQWRRGILRSESSGVGKWGPRLLDTSSPWSHGTRWQG

SEQ ID NO: 5491 - protein, 70 aa, Homo sapiens
GGRGLLGLGPGCFISCGLSGHWSCRGRSIDAGSSSSLGSRSGSLGRAASWTASLAPGHLRRVSAELAEPA

SEQ ID NO: 5492 - protein, 70 aa, Homo sapiens
GLPGGSCGHLCGSCRARGGWSRGPGRRQPPQAALQRGGQVDGSCRGLPLPAWIPTSTRRQGLPSLPTGAL

SEQ ID NO: 5493 - protein, 69 aa, Homo sapiens
SWRVMQEVNPPNQHQTGAPRGHFIGLMMYGLWTPILEPERTMILIPRFPRRVLARFYSPSPNPISRASL

SEQ ID NO: 5494 - protein, 67 aa, Homo sapiens
CLASPRTPSWALPVSLRASSWQARPPLGGGRGVAGGNPSRKRMQWQLILVQRNWRQALRVSYPCRKS

SEQ ID NO: 5495 - protein, 67 aa, Homo sapiens
DRGPAGGAALWAVVRTAGAGQHHRTACEAHRDGDPGARDLPEPQEFNSFSTFNPVPRTPRACQNSQK

SEQ ID NO: 5496 - skipped

SEQ ID NO: 5497 - protein, 66 aa, Homo sapiens
AVRQHYGDCHAQRCQRQPPQVPTEPIPVLRGGDSWTWHTGGPAPGPGPRPGGQRPDGIQHPGWGGV

SEQ ID NO: 5498 - protein, 66 aa, Homo sapiens
GPSVRRQRLVQNQLWRVLQGRAGPGAVRAARGQGHQAAGHQPGCGAAGQRLALLLQLPGLDRVPAV

SEQ ID NO: 5499 - protein, 66 aa, Homo sapiens
PGRRLRLGALRWLLHPGRRRRRGGVLRVGAAGPGPGRRQGAAGRTPAAARAAAAAPGRAGRPVAQQ

SEQ ID NO: 5500 - protein, 66 aa, Homo sapiens
PLPPRRPPPAWGPSPAPLRLCWSVGRPHLGPPLPPATPPPRHPWPPQASLLCFQPRTRLLPATSRP

SEQ ID NO: 5501-5502 - skipped (2 entries)

SEQ ID NO: 5503 - protein, 65 aa, Homo sapiens
RGDREATGSGWVPGCAPFGQAGSRASRSPRPSVVRLPLGVHLPGVLPAGMTDPPGAPPPALAGRG

SEQ ID NO: 5504 - protein, 65 aa, Homo sapiens
RSPGSRRTDRRCCGWWWNSSRSCGSTTRRSTRACSSSGGTAPWAARRRRGWGLRRSSEWKLFLEI

SEQ ID NO: 5505 - protein, 64 aa, Homo sapiens
AAAMAAGSGGRGTPAAGRGCHIPVESAATAPGGQRPGRRQRPEAQQRTEDPGGQGQSGPGQRTP

SEQ ID NO: 5506 - skipped

SEQ ID NO: 5507 - protein, 64 aa, Homo sapiens
PTRMWMMSPRLQPWPGPRSPCRQMSPRARGIVGESRLIRGPRWTAATPRDSGDRTACEPMNGKP

SEQ ID NO: 5508 - protein, 64 aa, Homo sapiens
QWAACATCRWAWSCCSWASCSPLSTSTDTSSLRSWPEITSSAVVCCMRTPCPPRSGLRWSWKRM

SEQ ID NO: 5509 - protein, 64 aa, Homo sapiens
RPASSRCTTPSPRRRAAASRSRSPGRPPRPRPRHPRPLRPPPGPWPRRPPPPTPTRSTGKPRLC

SEQ ID NO: 5510 - protein, 64 aa, Homo sapiens
SLPPGCFWPCLWNSLLRFCPASCSGCYSWTIPPTGSPFSCTTTRSSMNPTSLTPGRSSRTTSQL

SEQ ID NO: 5511 - protein, 63 aa, Homo sapiens
AEQTPEVVVVRVRLRGTRHRLRPPERLREPRPEGVGVAAAETQPPLFPLFAERRRVASIRQLP

SEQ ID NO: 5512 - protein, 63 aa, Homo sapiens
AGGRHGWPRVRGHPRAQHLLWGHREGLLCPPLPWHCHQVRVLLCQSGPRFWGALPALSCQRLR

SEQ ID NO: 5513 - protein, 63 aa, Homo sapiens
GPGGAAARGGKPGARDSSSPDPGIFHRPLPAARFCSDSPPQELLQRPIPAPLCGLWYGPSSHP

SEQ ID NO: 5514 - protein, 63 aa, Homo sapiens
PLEGPATPPLPRWCLPSWHQSWPWSLSWAWWGTVWPSSSSASTRGPGPPTRCSWSAWWPLTSS

SEQ ID NO: 5515-5516 - skipped (2 entries)

SEQ ID NO: 5517 - protein, 62 aa, Homo sapiens
ALPTGCGSCPPCPEASPLCSTRRCSTTGSPPPSNTSLIPGTRMSGKAPTGPPQSGEPLASRS

SEQ ID NO: 5518 - protein, 62 aa, Homo sapiens
ALQTGPGSCPPSRAASLLFSIRRWSTISCPRPSATSQTPGRGVPPRAPASPGRRPLKKWPTP

SEQ ID NO: 5519 - protein, 62 aa, Homo sapiens
GGHVSGLLSPWKWQWLQGVCAREEGAATESPARTTMKARSTEGLWLAHKHAWCTRQREQPRR

SEQ ID NO: 5520 - skipped

SEQ ID NO: 5521 - protein, 62 aa, Homo sapiens
MEETVVVAVATVETEVEAMEETGVVAAMEETEVGATEETEVAMEAKWEEETTTEMISATDHT

SEQ ID NO: 5522 - protein, 62 aa, Homo sapiens
PAVAVVGRWRSAARPSAACTTRPRCCDTATMTICRARAVWKWTTACRRWSSGCSYRKTSWRS

SEQ ID NO: 5523 - protein, 62 aa, Homo sapiens
PGALVALGWGTAVASAEVSAVASGAGVAAVDGAGAEAAELAEARPRIRSGCPSPSWAAWSRT

SEQ ID NO: 5524 - skipped

SEQ ID NO: 5525 - protein, 62 aa, Homo sapiens
SGRGRRRRSSLSCQGGWLSLTVSEGMSPKTWFLSRTSLTSILTCRSSCGHTASRPTFQSRQL

SEQ ID NO: 5526 - protein, 61 aa, Homo sapiens
AVPPGRGRGGWPPQPDTAQQPCVHQVLLKRPALGTGHENGRGGDQQQVGSAARAAPGLRPL

SEQ ID NO: 5527 - skipped

SEQ ID NO: 5528 - protein, 61 aa, Homo sapiens
LAASSSTTASPRPSGTALSSLPPSTLRSPSPTMSVSRVTMTPPSLRDTPLSATSPWKCSSS

SEQ ID NO: 5529 - protein, 61 aa, Homo sapiens
PQRCWGDHAGCVAPRTWHPAMGPCSPGPLGNPEQHLSHPGRLWGQQPLRQHHLLLQVCVLP

SEQ ID NO: 5530 - protein, 61 aa, Homo sapiens
RSALGTFAAATPPAAAPSPTAPGTATGRSCTALPSRSESTASWFDSLHEELKRIRSQTHTA

SEQ ID NO: 5531 - protein, 60 aa, Homo sapiens
GALRAVVQSSPPTLRCSAAATTSPTLLFSCNSPQPWSLQSCWHLLRTSPSWAAASPSWPR

SEQ ID NO: 5532 - protein, 60 aa, Homo sapiens
SPAGRGCGLWAERGELRPAGFRCTPRAGGRRRCGAGHRAGDDADEPRGAPGPSPVRLPKG

SEQ ID NO: 5533 - protein, 60 aa, Homo sapiens
SRSSATLPGRRRRRWLRRRRQPISVAPAGPPRRPNQKPNPPGGARCVIMRPTWPGTSAFT

SEQ ID NO: 5534 - protein, 60 aa, Homo sapiens
VLWRALPPHLFLAGVCLPGTNPGPGVCPGPGGEQFGPLHLLHPHAALDLQHGVPGQPGGR

SEQ ID NO: 5535 - protein, 59 aa, Homo sapiens
QAGWPLQPPPGAASAGPLLLGLQGGPGRTQPCLWKPTLAGKEGRRPLANQEGTGRAEFA

SEQ ID NO: 5536 - protein, 59 aa, Homo sapiens
RGRGCWRSPRSASASCCKSALRGPPRRPPARPAALAPGTPPSAWTQRRCPGTCPRRSSP

SEQ ID NO: 5537 - protein, 59 aa, Homo sapiens
SSWMPRAPRPLRPSIPPMEVSSARYPWPKSPTSTRQWPQPRMPLRMDGGGRSVRGTGAG

SEQ ID NO: 5538 - protein, 59 aa, Homo sapiens
TPARSESGECFSPRRRPTSWSGAFGSSGTCRRPSANTWPASSASRPRRSRSGSRTTATR

SEQ ID NO: 5539 - skipped

SEQ ID NO: 5540 - protein, 58 aa, Homo sapiens
GPQQHHALRGVCWRCQRLSADPLPLQQGPHPASHQPERRGPESLGHPEKPTLLGQKGG

SEQ ID NO: 5541 - protein, 58 aa, Homo sapiens
GRPQPPCPAHLSECEERGIGGLPHQAAQLRGPDLHSLPEEGGRGAGHTARKPWPEPPT

SEQ ID NO: 5542 - protein, 58 aa, Homo sapiens
PEAPSTRAAPPSLRAARAHQRTGRQHPPPAKHSSSQCTQGRRWGAWHPGSWPVAQRMG

SEQ ID NO: 5543 - protein, 58 aa, Homo sapiens
SSGSGDSGVLLRASQRRQRQGRKRTESGTNMRRASGQESGTLRAPRSAQQRQSRITAP

SEQ ID NO: 5544 - skipped

SEQ ID NO: 5545 - protein, 57 aa, Homo sapiens
NRFRLCITILPGMKMSWSSEKVMSLMSWKSVMTAGLWGPQEEPNSLVLSPETTSRGC

SEQ ID NO: 5546 - protein, 57 aa, Homo sapiens
SGLTSRPMITSSRLLEMASASACPVSRPWMSLRLQGPSGSSVTSSWGRMWPSSTAGT

SEQ ID NO: 5547 - protein, 56 aa, Homo sapiens
AAGQCERGAGGAVGSVGGAGGRGHAGMRAALLWGPWGAGLSSQRDPQCLGAQGAGQ

SEQ ID NO: 5548 - protein, 56 aa, Homo sapiens
GTCLAAGVGPPGPPRQPLQPFLRGAVHAQRAACHQRPQPLREQRVLHPLGGARLPS

SEQ ID NO: 5549 - protein, 56 aa, Homo sapiens
LPCRLGLDRAPHLGQPHSCFPSGDGQLFPVPGLPLPARPLEGECRQGHRHHQEEDL

SEQ ID NO: 5550 - protein, 56 aa, Homo sapiens
LPVNVHLVSHSITLLVSTTTNVGLNLRFVEQRESVKTLQAVSAVNAKEGSLLMPPD

SEQ ID NO: 5551 - protein, 56 aa, Homo sapiens
RPPPPPPRRCPPRPGAACSRRAAGPCSPAARPCTSPPPAPPRPPSTAASSCSTGPK

SEQ ID NO: 5552 - protein, 55 aa, Homo sapiens
AACASASSVRPSRRRRAASSTTASWSASLTRPSAACGSTRARSCSTPCWRRCASP

SEQ ID NO: 5553 - protein, 55 aa, Homo sapiens
EEEVVEEVSKAGEIMVEEGVMVEEGAMVEEAMEIHMEEVVVVVVVVVEEVDIEDT

SEQ ID NO: 5554 - protein, 55 aa, Homo sapiens
GPLCCHCEKLPGDGANYHQSSGSCRGLDSDRYLAFLAERPSLCRSRGLEPSRMGG

SEQ ID NO: 5555 - protein, 55 aa, Homo sapiens
GRLASSAPTWGCLCRAPPSRPSGRPRPDPALSLEAHTCWQRRTAAPGQPGRHRQG

SEQ ID NO: 5556 - protein, 55 aa, Homo sapiens
LSEGPSPPQPLRPPAATPPNHSALWKEPAPSPQQETPAGRGNFRAPRGGDTPTEP

SEQ ID NO: 5557 - protein, 55 aa, Homo sapiens
LWRRPWWWQWLRWRPKWRLWRRQEWWRLWRRPRWGLRRRPRWLWRQNGRKKRLQK

SEQ ID NO: 5558 - protein, 55 aa, Homo sapiens
PWRRRPVAGRRRRARRAPEARRAPEARGLAPRTLRPPRGLRPRAMPKTKPHVPLP

SEQ ID NO: 5559 - skipped

SEQ ID NO: 5560 - protein, 54 aa, Homo sapiens
LPQWRKRPVSLRRRHLGRLMTCWKATWAFGTPSWRPPWWRRPRRQRAPRSLHAV

SEQ ID NO: 5561 - protein, 54 aa, Homo sapiens
QPCSRSRSSSRLISPTRRVGRRRRRTASTPSPSPCSQAPAVASRGWWRPSRPSC

SEQ ID NO: 5562 - protein, 54 aa, Homo sapiens
TTPATRWWWMGKSTTSTCCPAASSTPRPCPSLATGWSSTCQACLRKQRRMKRKA

SEQ ID NO: 5563 - protein, 53 aa, Homo sapiens
AHGLRTQLPGEQLLAPRRLPPLQSPDPGHLQAGPQMPSLWSELPQAVQGSPVS

SEQ ID NO: 5564 - skipped

SEQ ID NO: 5565 - protein, 53 aa, Homo sapiens
GDSLLSTQQAGAVGTPGHHRPARRREQGPRRGHTRDWHTVQGCLSRGRDTRSL

SEQ ID NO: 5566 - skipped

SEQ ID NO: 5567 - protein, 53 aa, Homo sapiens
TWPAACWCSSSPSSSATWTSPGAAVPVALRPSASWSRCTCSSSATMWRSTTPR

SEQ ID NO: 5568 - protein, 52 aa, Homo sapiens
CHPAWLSPISACPRLLPYPFHVLALEVTFPPGTAMPQMQLQALAMWEKGWDK

SEQ ID NO: 5569 - protein, 52 aa, Homo sapiens
RNPRLPNHGRPKSPNQRTAIKKELQIPPLKMGQGMDSPFCLLRALFWDRSCP

SEQ ID NO: 5570 - skipped

SEQ ID NO: 5571 - protein, 51 aa, Homo sapiens
EEALWAHLQQPPLLLLHRLQQLLELRRGGPAQPCHRGQSPLPAGSTLCTRN

SEQ ID NO: 5572 - protein, 51 aa, Homo sapiens
LTVACRSAQPTVAATAPAPRPWDHAAVSLASWDVPVTCTCGRTRGLGGGTT

SEQ ID NO: 5573 - protein, 50 aa, Homo sapiens
AAPCCRAGPGLSAPAQLLRRRLRSGADFQGEGYWPESAAVAESEVSETLI

SEQ ID NO: 5574 - skipped

SEQ ID NO: 5575 - protein, 50 aa, Homo sapiens
CQKIKLALSSPPRCGLLCSTMATWAASGICSSMAKAKISGKWLKFKVLLE

SEQ ID NO: 5576 - protein, 50 aa, Homo sapiens
GAETARRPGAAGFPAARPSARPGAAPVGAPGPAWSASLWASTCPEYCQRA

SEQ ID NO: 5577 - protein, 50 aa, Homo sapiens
GSSGSCSPPQRAHGVQTARGHLGRGGDGDPDAAAGGRAEQPKGGVGPVSG

SEQ ID NO: 5578 - protein, 50 aa, Homo sapiens
SCQHLRPAGTLPAPSSCWPVLLPGHLWKRQMASKPRQILGLRIPRWLPRL

SEQ ID NO: 5579 - protein, 50 aa, Homo sapiens
SSSPHICQRGPTHTRLSLQGSKASKEFTRRRRPSCTDEAEEWPVPWAGGA

SEQ ID NO: 5580 - protein, 50 aa, Homo sapiens
YPSWEAQEPLRSRNPAVWLGRAPGERSESSSWTQGSARSHQGARLSIWPR

SEQ ID NO: 5581-5582 - skipped (2 entries)

SEQ ID NO: 5583 - protein, 49 aa, Homo sapiens
TMCLCPTSSREAGRTLLSRSPGRGQSQSWGSNELSRGARGRTMPSPTGT

SEQ ID NO: 5584 - protein, 48 aa, Homo sapiens
GFCEWTATPGCSPPEDSGTCSSRCQALRHLQAASGQPWLCQQNSWQVL

SEQ ID NO: 5585 - protein, 48 aa, Homo sapiens
GLAPHRHGPHQELRRGGIEARPAWRRWQPPENGAYKPVLLGLRDSTGL

SEQ ID NO: 5586 - protein, 48 aa, Homo sapiens
GPGATCLLCAPPLQCPGRRHFPATTGAGGSLVHWGVWGPPAGRELRGD

SEQ ID NO: 5587 - protein, 48 aa, Homo sapiens
GSARPDWAGRRGGSLTLTPRRGGGAQLLGRRDMAGAEAEAGRPHDRLD

SEQ ID NO: 5588 - protein, 48 aa, Homo sapiens
KTGSSWTGSCRQGWRWSGSDCGISITTTTPRGACGASAAGRALARGRL

SEQ ID NO: 5589 - protein, 48 aa, Homo sapiens
PGGPGCTRCSGWCKGCRADRSNPSGFNPTRRCSPPPDRPGGGPGCGEG

SEQ ID NO: 5590 - protein, 48 aa, Homo sapiens
VQGQRRHRHALRLPTLRLFPAVPPVSTKDIGQARRRTHGDSHRQRHCL

SEQ ID NO: 5591 - protein, 47 aa, Homo sapiens
AASPPGVSGRVCGTAYSVSAPLPAAAATPGLSPRQGHPFPAQQRGLP

SEQ ID NO: 5592 - protein, 47 aa, Homo sapiens
ARGPWWPWDGEPRWLPRRFRQWHPGPGSRPWTGPGPRPRSSRRQGRG

SEQ ID NO: 5593 - skipped

SEQ ID NO: 5594 - protein, 47 aa, Homo sapiens
EATVHEPVLSDLVLLPSAGPQAGHSQQLQQDQEASHAHHRGTQLPVF

SEQ ID NO: 5595 - protein, 47 aa, Homo sapiens
GHLHQCLCDYTHVLPVTVLHAHREVCAQSQCLHQQRELLFPLVAGHA

SEQ ID NO: 5596 - protein, 47 aa, Homo sapiens
GSATKMSTNAARRTGAASRSATTSRVASTVPATAASSSPLMAGPAKT

SEQ ID NO: 5597 - protein, 47 aa, Homo sapiens
LWLLSPSRKRRRGSSPPGRHWLCPQTRRSPCPPMPTRRSLAPTAAGS

SEQ ID NO: 5598 - protein, 47 aa, Homo sapiens
PCRRPPTAPASRPPAWPSRRPPAGPCKPPEPGNQWKEPGRGQASPDC

SEQ ID NO: 5599 - skipped

SEQ ID NO: 5600 - protein, 47 aa, Homo sapiens
SCSPQARTASGAAEGWDRGQASMAEVAAARKWRLQASSSWPQGQHRP

SEQ ID NO: 5601 - protein, 47 aa, Homo sapiens
TGVRTSEGSRCAPALPARRPRTPEALRSRPGSPALCFASCSWCPTTS

SEQ ID NO: 5602 - protein, 47 aa, Homo sapiens
TRLSPMWAVLPRCSFLPHGPVLTASFWLPWALTDMWPSVLHSTMPAT

SEQ ID NO: 5603 - protein, 46 aa, Homo sapiens
AAGAQEVRSDRRLPVVQAGAGPGCERQSAGVLPSAHWTEVCPEAPV

SEQ ID NO: 5604 - skipped

SEQ ID NO: 5605 - protein, 46 aa, Homo sapiens
GARVSTLPPRRRSQRWGLSRKIGCRSPGVVSLAVAWPPDASQGSRS

SEQ ID NO: 5606 - protein, 46 aa, Homo sapiens
GSGSARLPSRRTPPCRRVRGPASPMGMRRRAQPSASTRRCSACSTS

SEQ ID NO: 5607 - skipped

SEQ ID NO: 5608 - protein, 46 aa, Homo sapiens
PRKMILSQLHHSMTRFWRWSPCSAACRWPSLESSGYSIIGSPSVAR

SEQ ID NO: 5609 - protein, 46 aa, Homo sapiens
RGQDPARPGFRRQQPDPSHRAPEDPGAAAVSCLHQLAAALQLHMVT

SEQ ID NO: 5610-5611 - skipped (2 entries)

SEQ ID NO: 5612 - protein, 45 aa, Homo sapiens
GALWPLHPRLPGHRRLREGARRRRVCVRLHLCPWQWLPGDGRRSP

SEQ ID NO: 5613 - protein, 45 aa, Homo sapiens
GPGRPREARHRGHSAADNDHHRPEPGRGPGQETRPKLPPNEACSL

SEQ ID NO: 5614 - protein, 45 aa, Homo sapiens
LLSCLFSGWSTSSGSSERPSLSQPTQNRAKSKAMSGAQLWASSSG

SEQ ID NO: 5615-5616 - skipped (2 entries)

SEQ ID NO: 5617 - protein, 45 aa, Homo sapiens
RPRRKGSLGRGLPPSHPTQERPGHLQTRVRSHSRGPGRSRPSWFK

SEQ ID NO: 5618 - protein, 45 aa, Homo sapiens
SCHFSSSSSGSRRSPAQPTMPGSMSCWALAPARPCPPGRCWAWRS

SEQ ID NO: 5619-5620 - skipped (2 entries)

SEQ ID NO: 5621 - protein, 44 aa, Homo sapiens
GAGCPRRCQIRAWCRARVDGRCGVWRRRTGPPRLPPKPLGPEQL

SEQ ID NO: 5622 - protein, 44 aa, Homo sapiens
GLHPHHRPEGGVCRWNEQVGTLLPGEHDRVCGKESARRPCHRQR

SEQ ID NO: 5623 - protein, 44 aa, Homo sapiens
GPKKGARHRWPVPAPLLSASASTSLPSPSSCPHTLFRKNPLWRC

SEQ ID NO: 5624 - protein, 44 aa, Homo sapiens
LPHVERYLPKRNPPASLDPVQPHILLKRHQEPIANWGLWLHRSL

SEQ ID NO: 5625 - protein, 44 aa, Homo sapiens
LWLWAGWTVWWSCGPGEKGHGWLPSLPTMALLLLRFSCMRVASY

SEQ ID NO: 5626 - protein, 44 aa, Homo sapiens
PGQRRCCSPRRPQPWKRGRTAPAEVHKARSGKGEAQCRGRPARS

SEQ ID NO: 5627 - protein, 44 aa, Homo sapiens
QQRRPHGGGGWERVRLPPAAQRHHQHQGRVLHWQRGGHPLARLV

SEQ ID NO: 5628 - protein, 44 aa, Homo sapiens
TSRPCTSTSTTSLLPMALLCVKRGRRCTKAKATAVSAAVSTEQI

SEQ ID NO: 5629 - protein, 43 aa, Homo sapiens
EREGETERQGPRARPGQREGQGQTESEKRGALLGPGQGEEQRA

SEQ ID NO: 5630 - protein, 43 aa, Homo sapiens
HGAKVRKRKRETRIQPPRNRSHCLPCLPWVHLHQNPTDHQMLT

SEQ ID NO: 5631 - protein, 43 aa, Homo sapiens
HGLLPLPRDHIHLRDSLPEPTDHTTEDCSQSLCQRLPGERQKL

SEQ ID NO: 5632 - protein, 43 aa, Homo sapiens
PWPALAWCAWAWSASASSCSLASPALPDAWPSSPCPTSRSRAA

SEQ ID NO: 5633 - protein, 43 aa, Homo sapiens
RVRIQPLVLESRVKIQHPVRACRVQIHHWVLTSLLRAFRSRPR

SEQ ID NO: 5634 - protein, 43 aa, Homo sapiens
TLSHQIKSSFGQKMGKVIFTNYLPVAFQLVIHSAVMWGRQLKI

SEQ ID NO: 5635 - protein, 43 aa, Homo sapiens
TSQRFSSTALACAPSRIQFPMGLAGLSQCPPPLSEMTLSFRLV

SEQ ID NO: 5636 - protein, 43 aa, Homo sapiens
VSTSWGPTAGAARARTCSPCSPTTPSPASGSTSRRTRPNRVLT

SEQ ID NO: 5637 - protein, 43 aa, Homo sapiens
WWCTRGGGKRKKKMCKVSGGCTACVERCPWKGICWKWPVTVAA

SEQ ID NO: 5638 - protein, 42 aa, Homo sapiens
ALSVYQFFIPQREVKISTIILPSNKPFKPLTKRILVLLGSIK

SEQ ID NO: 5639 - protein, 42 aa, Homo sapiens
AMGPKSGKGKGRQEFSHPETEAIASLVYLGSTSTKTQQTTKC

SEQ ID NO: 5640 - protein, 42 aa, Homo sapiens
GAWELGGLARWGPLCTHPQCQVLLLSSSTTSSSSSSSSSSLV

SEQ ID NO: 5641 - protein, 42 aa, Homo sapiens
KERNWGRKRRWRRRVMLIVMKKRRKMRRAPRRAWRLRTGPRE

SEQ ID NO: 5642 - protein, 42 aa, Homo sapiens
PGVQGAAVMPTGACATTGIAITPRNATTPSASRPTCRGACSS

SEQ ID NO: 5643 - protein, 42 aa, Homo sapiens
VSPRAGAQPQEQPERGHAHRAVLQHRHPPVALPQGEHVQIGS

SEQ ID NO: 5644 - protein, 41 aa, Homo sapiens
AAASISVLQGPSRPPAAAGLFSCLGTSGRGRWRPSHDRYWG

SEQ ID NO: 5645 - protein, 41 aa, Homo sapiens
CRDGSWLWRSGHPCCWARVPYTCGVGSNGAGRPEAGATPAA

SEQ ID NO: 5646 - protein, 41 aa, Homo sapiens
GYWAESTACLHRSEEHGCHLAGQPADPSPVALHPGHSLCTV

SEQ ID NO: 5647 - protein, 41 aa, Homo sapiens
PEPLEPMTSQGAHTTSCAGRRRRSSRRHISPWGTGATRTCS

SEQ ID NO: 5648 - protein, 41 aa, Homo sapiens
SSTEGPCTEMEGKEGRGLVPHPLTPLPAGPSTLRARPEATA

SEQ ID NO: 5649 - protein, 40 aa, Homo sapiens
ATRGTPCPGAGCRPPGIDRQPPVLPEGYGEPLRVLRGHHV

SEQ ID NO: 5650 - protein, 40 aa, Homo sapiens
CAVLPRRTGTICTGPATATPPSLWSRFPRGRLLAGKRRCG

SEQ ID NO: 5651 - protein, 40 aa, Homo sapiens
CPLSLWKRLKVFSRDGLSEDQVLHRLTVGKSHLLEFQTPL

SEQ ID NO: 5652 - protein, 40 aa, Homo sapiens
GPGGPQHLLQQSAQRPWPGPARVCAARGLPQSQAPTESCQ

SEQ ID NO: 5653 - protein, 40 aa, Homo sapiens
HLPGSRRRPPRPPTPTPPTLSTRRCPRPACCLSSAPAAPP

SEQ ID NO: 5654 - protein, 40 aa, Homo sapiens
KGLGDRRAGAGRGQSGWSGEARDGSCKNSPGCVDGRRGSG

SEQ ID NO: 5655 - protein, 40 aa, Homo sapiens
LCTAKWPGQYGPTWASCPLAQQCLAHTQFLRALGSPWGRD

SEQ ID NO: 5656 - protein, 40 aa, Homo sapiens
LKNAAASRSMESTQRSPITWTGCGSRWAYHKVLWSPRWNG

SEQ ID NO: 5657 - protein, 40 aa, Homo sapiens
LRKLLQQPGLLTAGEEGTGPGAGAREAASAGVSQSQLLGS

SEQ ID NO: 5658 - protein, 40 aa, Homo sapiens
PAAPEWPASRVLCASTSYSPPGGCPRPCAGHGAACLPPWR

SEQ ID NO: 5659 - protein, 40 aa, Homo sapiens
PPRVDSAQMWAIAPSREGQSLRAPPSCGRPLRSRRPARGI

SEQ ID NO: 5660 - skipped

SEQ ID NO: 5661 - protein, 40 aa, Homo sapiens
QQRAPPHHPPCPPVHPGPCDASPDPTQHAGSAGGGLSQAS

SEQ ID NO: 5662 - protein, 40 aa, Homo sapiens
RREPQGLGGWTSGVGAEPQWARGRPPAAAPEAAWTQRPDG

SEQ ID NO: 5663 - protein, 40 aa, Homo sapiens
SMTAQGTCCTGGRRPPTAASCERLSASSVSMTTSLSTTSG

SEQ ID NO: 5664 - protein, 40 aa, Homo sapiens
TPTTSRSSGSLLEVPASLCRPSPPTTRASSGEPSARAAWP

SEQ ID NO: 5665 - protein, 40 aa, Homo sapiens
TTFQRAPLKFKLALKRVCRKSVLGALGSMVGLSGGQRTSW

SEQ ID NO: 5666 - protein, 40 aa, Homo sapiens
TTVGLLRMAATRTSLPCTPLWLCSPAPWLPKMPPFVSTTP

SEQ ID NO: 5667 - protein, 39 aa, Homo sapiens
GLYCPVYQDSQGTKARRVQQGDQETHGDAQRPGHHHLCQ

SEQ ID NO: 5668 - protein, 39 aa, Homo sapiens
GVPAGHVCPWLQWPVLQRVHGGLWAHRAGPALPPACPLC

SEQ ID NO: 5669 - protein, 39 aa, Homo sapiens
KISPRRRISCCYYKRTDHSAGSKHPYFENVAYSGWDSNI

SEQ ID NO: 5670 - protein, 39 aa, Homo sapiens
PPSPPLALGPRMQLCTQLARFFPITPPVWHILGPQRHTP

SEQ ID NO: 5671 - protein, 39 aa, Homo sapiens
PRPAGPIPCAEGLHAVPARGGLLPGPGAHCRCLAHAYAC

SEQ ID NO: 5672 - skipped

SEQ ID NO: 5673 - protein, 38 aa, Homo sapiens
GPGTLRHGRDDPLQGRGRSSEGKDLRRDQSSRRGRRFS

SEQ ID NO: 5674 - skipped

SEQ ID NO: 5675 - protein, 38 aa, Homo sapiens
TLQRLTTSGLMGKMEYPSYTPAASSSCSLWQSPRTTER

SEQ ID NO: 5676 - protein, 38 aa, Homo sapiens
VSLPPPPLQRLQGHLGRPYPPCHLLRCGHRPLQCLFLG

SEQ ID NO: 5677 - protein, 38 aa, Homo sapiens
YLSAPGWWPPPSHKRFLICTSPSASSLVWDTALVFSQL

SEQ ID NO: 5678 - protein, 37 aa, Homo sapiens
ALKLRGSGLPARRGAGAQDGVHEVQVPPGRRQYILKN

SEQ ID NO: 5679 - protein, 37 aa, Homo sapiens
GPTWWQHLTFDVETDEEPQGWELPFDAGQATERKCTQ

SEQ ID NO: 5680 - protein, 37 aa, Homo sapiens
GRPGRSSADHWHSGVPTRILPPAHRLLCIQRLPWLLL

SEQ ID NO: 5681 - protein, 37 aa, Homo sapiens
GRRCQVQGLAGSLRRVRHGSLCPGIGPSLLGHSKKPQ

SEQ ID NO: 5682 - protein, 37 aa, Homo sapiens
LPCRLGVDRAPHVRKHHPCVPPGDAQLPAHPLLRIPA

SEQ ID NO: 5683 - protein, 37 aa, Homo sapiens
PSSAQALAAAACPRGASSPMPLTRQPCMQPATRWSLS

SEQ ID NO: 5684 - protein, 37 aa, Homo sapiens
QEEENPPGSCAGCGLHLGDRAEEEQPSREEWEGPTAG

SEQ ID NO: 5685 - protein, 37 aa, Homo sapiens
RRRRGRARAARTGRGARRARRRTASTRSRRSATTRSS

SEQ ID NO: 5686 - protein, 37 aa, Homo sapiens
SLQVPQNAAAASWPVRASSVASQKWGPLGQPWLSPIC

SEQ ID NO: 5687 - protein, 37 aa, Homo sapiens
TCLPWKGHPIPRHCHGGPVREARSWAFPAWPQRMRSL

SEQ ID NO: 5688 - protein, 36 aa, Homo sapiens
AETTLSTAASSSRNSWADGQARICEPVWTSTTTSWV

SEQ ID NO: 5689 - protein, 36 aa, Homo sapiens
AGGMFLACCHHGNGSGCRVCVQGRRVLPQRAQPGPP

SEQ ID NO: 5690 - protein, 36 aa, Homo sapiens
CSPWARPRRLASAAGHGPAALCAPGSPQTACSGHWP

SEQ ID NO: 5691 - protein, 36 aa, Homo sapiens
GHCSYKQHSAQHSLQCDFLHCYSQQYSRPSPVLAQQ

SEQ ID NO: 5692 - protein, 36 aa, Homo sapiens
LRLLAGCGGAGNHQGADGHREENWCLYATDALSLLR

SEQ ID NO: 5693-5694 - skipped (2 entries)

SEQ ID NO: 5695 - protein, 36 aa, Homo sapiens
RAQAGAAPRATAAARDPHGAQAARWRFCVGGPGDQS

SEQ ID NO: 5696 - skipped

SEQ ID NO: 5697 - protein, 35 aa, Homo sapiens
GPAPACLLLPYPSQGQVPLARPAPAQAAGVSLGQV

SEQ ID NO: 5698 - protein, 35 aa, Homo sapiens
GSCGRACSCGRGCGTPRGDWKRHTRRRSRSRPPRR

SEQ ID NO: 5699 - protein, 35 aa, Homo sapiens
KRSSRLGWASGRITYSHSPPRGWCSAAWPPRHGWC

SEQ ID NO: 5700 - protein, 35 aa, Homo sapiens
PLGRGSLEGAQSPRECTVLSWSASGLGSLSAANTT

SEQ ID NO: 5701 - protein, 35 aa, Homo sapiens
WRPRLHEVQWVVQRLPCRQVQPLWIQPHQEVLPTP

SEQ ID NO: 5702 - skipped

SEQ ID NO: 5703 - protein, 34 aa, Homo sapiens
AEVRAQKVDPLLRGRHSHHLLCGAQRLRPETLRG

SEQ ID NO: 5704 - protein, 34 aa, Homo sapiens
ALWAVWVALAHGCHGPLRHPCQCVDSDAYCHRAW

SEQ ID NO: 5705 - protein, 34 aa, Homo sapiens
GRERGGSGSTWPEPAAARQSEEGASPGAAARQEA

SEQ ID NO: 5706 - protein, 34 aa, Homo sapiens
LSQHPCRLPTSQHDEVVPGLVGEEHAPETHVWQQ

SEQ ID NO: 5707 - protein, 34 aa, Homo sapiens
QGPHRPPVALAEDAGLSSRATCYSPLRVARAGPH

SEQ ID NO: 5708 - protein, 33 aa, Homo sapiens
ATCQHRDGGRLLLTRGFSYVRRHRHHLWSGILL

SEQ ID NO: 5709 - protein, 33 aa, Homo sapiens
GHSQCIRRAGIFRGTRFRRHLLRRESNSFLLCF

SEQ ID NO: 5710 - skipped

SEQ ID NO: 5711 - protein, 33 aa, Homo sapiens
HPGASPLRGVWNTVSRSQCLRLKMEARQLCPRR

SEQ ID NO: 5712 - protein, 33 aa, Homo sapiens
HRLRLQRTCLQEFLLPPPYPPPLFLATPTRAMV

SEQ ID NO: 5713 - protein, 33 aa, Homo sapiens
RAPPRVLVQKWRAKRGGGWSPTPLPHSQLVPPL

SEQ ID NO: 5714 - protein, 33 aa, Homo sapiens
RGPGLPGGAPQRCDRGQSPGQPATGAVGLAAQG

SEQ ID NO: 5715 - protein, 33 aa, Homo sapiens
RSRGRRSRLRPHPPAPVPESAALPRAAARSRAS

SEQ ID NO: 5716 - protein, 33 aa, Homo sapiens
WRPRLHEWVVQRLPCRQVQPLWIQPHQEVLPTP

SEQ ID NO: 5717 - protein, 32 aa, Homo sapiens
ALQAAAQTLRETDPHIQTGQTASCPFGDMAWV

SEQ ID NO: 5718 - protein, 32 aa, Homo sapiens
ALWRRGRSGVYALPRLAEPAFRHGPGTLPALG

SEQ ID NO: 5719-5720 - skipped (2 entries)

SEQ ID NO: 5721 - protein, 32 aa, Homo sapiens
GPAGHRHLLCPVHLHGLWRAEAREDFCRGKAS

SEQ ID NO: 5722 - protein, 32 aa, Homo sapiens
PTPARRTKKQSSATYVSLVSSAISLLVNSWRD

SEQ ID NO: 5723 - skipped

SEQ ID NO: 5724 - protein, 32 aa, Homo sapiens
TPLSISRPTSRARQSCCLPGLTHPAHQPLGSM

SEQ ID NO: 5725 - protein, 32 aa, Homo sapiens
YPAHSPWCGPSPGSILRIMGAGTPSTPHCGGS

SEQ ID NO: 5726 - protein, 31 aa, Homo sapiens
AAAAAAAGDRCPGGLGCPLRRPQREAAATPC

SEQ ID NO: 5727 - protein, 31 aa, Homo sapiens
APGGGSLGRQQSRLLHQLLAQRGQRLHCRQP

SEQ ID NO: 5728 - protein, 31 aa, Homo sapiens
GGLQGHGAQRGGAARPSARSFCPSSSATGGA

SEQ ID NO: 5729 - protein, 31 aa, Homo sapiens
GPFHVDQTQQPVSGCHIQEERVRVAGLFFPL

SEQ ID NO: 5730 - protein, 31 aa, Homo sapiens
GRRWLWWGDGGARPGLLRPVRHVLAAAILQR

SEQ ID NO: 5731 - protein, 31 aa, Homo sapiens
LLQGAEALQSPVHAGGSHAQTHWREATQVHV

SEQ ID NO: 5732 - protein, 31 aa, Homo sapiens
PAPGGGDRGRSPGCPRLPHRNGRQVAPWGGA

SEQ ID NO: 5733 - skipped

SEQ ID NO: 5734 - protein, 31 aa, Homo sapiens
PRAPAITWPATQHLPLPSLGGPLSTLPRITS

SEQ ID NO: 5735 - protein, 31 aa, Homo sapiens
QATGWRSCWTFSRMSTCPSGERQRKRHLKQE

SEQ ID NO: 5736 - protein, 31 aa, Homo sapiens
SCWRCPRSPWTGKAPRRGSRWGRSHRRRLMG

SEQ ID NO: 5737 - protein, 31 aa, Homo sapiens
TGSEARNRSEKDNRGIHVSERLTWKRIFPTC

SEQ ID NO: 5738 - protein, 31 aa, Homo sapiens
WRSAWAAPCTTSATCCWSPASPRARPSMPAT

SEQ ID NO: 5739 - protein, 30 aa, Homo sapiens
GSALPNGLGNTGPRGRRALWPSSVLPTLSS

SEQ ID NO: 5740 - protein, 30 aa, Homo sapiens
PGPPTPRLEKLSPGPRLGTRGSVSSSWKHL

SEQ ID NO: 5741 - protein, 30 aa, Homo sapiens
PNSVFCLWKTLSGAYKSPTKRGKRERSSLL

SEQ ID NO: 5742 - protein, 30 aa, Homo sapiens
RDASAPWAKVVRAAQKILLSSILSSLATPM

SEQ ID NO: 5743 - protein, 30 aa, Homo sapiens
RPSPCLSWSSRIVAPGHALSCRTRRRWSSK

SEQ ID NO: 5744 - protein, 30 aa, Homo sapiens
SAPAGQPRPWRPSRTAAPCAFGGSTAASCA

SEQ ID NO: 5745 - protein, 30 aa, Homo sapiens
SFQMIMGWPLPSGEPSSTGNVKTLDILNCW

SEQ ID NO: 5746 - protein, 30 aa, Homo sapiens
TRKASAASCASGVTTSTHRPASAWTSMHQT

SEQ ID NO: 5747 - protein, 30 aa, Homo sapiens
VAGTASCLRTGQTRGRRCWRGCCSASSTWA

SEQ ID NO: 5748 - protein, 30 aa, Homo sapiens
VGSGRLWDHAGRARAEPRGAPSNIGWGAKP

SEQ ID NO: 5749 - protein, 29 aa, Homo sapiens
AAAGGARGLRGQERPQGGAPDGAAATAGG

SEQ ID NO: 5750 - skipped

SEQ ID NO: 5751 - protein, 29 aa, Homo sapiens
ASEHQVMDLHQQDGRARGQCTHGQDPLLG

SEQ ID NO: 5752 - protein, 29 aa, Homo sapiens
GSGSTWPEPAAARQSEEGASPGAAARQEA

SEQ ID NO: 5753 - protein, 29 aa, Homo sapiens
GVLRPWAVPGQVPGQRGVPLPRGLPWNGL

SEQ ID NO: 5754 - protein, 29 aa, Homo sapiens
PAWGPAAAAPPAREGDFWLRRRRPRPGER

SEQ ID NO: 5755 - protein, 29 aa, Homo sapiens
QLSLLLMENSIGGLQESHQEGEEGEEFLT

SEQ ID NO: 5756 - protein, 29 aa, Homo sapiens
SPASPAPTARASSTSPRASLLWLASRPSS

SEQ ID NO: 5757 - skipped

SEQ ID NO: 5758 - protein, 29 aa, Homo sapiens
SWPPALWAPAGTGTASQGLPVPLLDPVHQ

SEQ ID NO: 5759 - protein, 28 aa, Homo sapiens
AATTLTSAASSAGSSWTPGRRGGTCASS

SEQ ID NO: 5760 - skipped

SEQ ID NO: 5761 - protein, 28 aa, Homo sapiens
GGGGGGGGDRRGGGGSAPALADFAGGRG

SEQ ID NO: 5762 - protein, 28 aa, Homo sapiens
GLEGGAWRTPALRSLFDWLSVRHHFPGL

SEQ ID NO: 5763 - protein, 28 aa, Homo sapiens
GSGHREGAYCQQRDCRREVHALHPQVGL

SEQ ID NO: 5764 - protein, 28 aa, Homo sapiens
GSQEWGWDPGVRAVPIPSPLSSRGTRKD

SEQ ID NO: 5765 - protein, 28 aa, Homo sapiens
GWEAATELHPSDTPMAGGVQGAGEPARV

SEQ ID NO: 5766 - protein, 28 aa, Homo sapiens
LTAVGPAQSRPAPGPNADPGPAAAAAAQ

SEQ ID NO: 5767 - protein, 28 aa, Homo sapiens
RGQSAKSGSTASRASQPSSSVWSSAATT

SEQ ID NO: 5768 - protein, 27 aa, Homo sapiens
AGVREQCAAAASDIGCRGAAAGQRHST

SEQ ID NO: 5769 - protein, 27 aa, Homo sapiens
CSIKPPLPRRWTTVLREPWHGMQEIRP

SEQ ID NO: 5770 - protein, 27 aa, Homo sapiens
GELLLRRRGGPHHMYQVPAQLGHLCLP

SEQ ID NO: 5771 - skipped

SEQ ID NO: 5772 - protein, 27 aa, Homo sapiens
GVCERPAPTRRGEAAHRGAGPPGCAAL

SEQ ID NO: 5773 - protein, 27 aa, Homo sapiens
LEPLGRPCPAPPAAASSVSPTTSPGTG

SEQ ID NO: 5774 - protein, 27 aa, Homo sapiens
PSTHGCCRPHGCPHLGPLGRPPCPSSC

SEQ ID NO: 5775 - protein, 27 aa, Homo sapiens
SGWAGDHGAASSASPRRALPVGSGGGD

SEQ ID NO: 5776 - protein, 27 aa, Homo sapiens
SLSSCGWAPFSVGLHMGFSTPATSLHP

SEQ ID NO: 5777 - protein, 27 aa, Homo sapiens
SLTLRLSETDTSSAFSSLLPLRNLSQL

SEQ ID NO: 5778 - protein, 27 aa, Homo sapiens
STSSVTASCASTGSSTASAATSRGMWN

SEQ ID NO: 5779 - protein, 27 aa, Homo sapiens
TSPQLETLKAITLLIEMDLFSDMSSTS

SEQ ID NO: 5780 - protein, 26 aa, Homo sapiens
ALCQGHVPGRGRLCWGDGTGSVGAHL

SEQ ID NO: 5781 - protein, 26 aa, Homo sapiens
ATEHGPGGRLPLPVAGQRHQRAQDCS

SEQ ID NO: 5782 - skipped

SEQ ID NO: 5783 - protein, 26 aa, Homo sapiens
FCPLGCCVHPPPPSALLAMKLLTAAT

SEQ ID NO: 5784 - protein, 26 aa, Homo sapiens
GCGAGTARRGARLQRGLLQGLCEGCP

SEQ ID NO: 5785 - skipped

SEQ ID NO: 5786 - protein, 26 aa, Homo sapiens
ISEPPATSSSPTGTWTPGQGAGFGGT

SEQ ID NO: 5787 - protein, 26 aa, Homo sapiens
LPGSTRRAGGSQRPGRRSPLMSSPEN

SEQ ID NO: 5788 - protein, 26 aa, Homo sapiens
LPHRWQGWGDPLPQDAERQLHQSHGG

SEQ ID NO: 5789 - protein, 26 aa, Homo sapiens
LPRSTACLSLSSPSFCPLSPAPPVTL

SEQ ID NO: 5790 - protein, 26 aa, Homo sapiens
LTHCPWPTSLSCCGAKSSAAPPTKRP

SEQ ID NO: 5791 - protein, 26 aa, Homo sapiens
NLPQKKDLLLLLQKDRPFCWIKAPLF

SEQ ID NO: 5792 - protein, 26 aa, Homo sapiens
PALRQRCQRMQPGERGLPPDLPQQAG

SEQ ID NO: 5793 - protein, 26 aa, Homo sapiens
PGPHTHLGILLYLSPFCSTCPEDQLP

SEQ ID NO: 5794 - protein, 26 aa, Homo sapiens
PRAETAQACSTPSHPATFPSSTSSQH

SEQ ID NO: 5795 - protein, 26 aa, Homo sapiens
PRDPTDPQWHWPKMLVCPQGQPAILL

SEQ ID NO: 5796 - skipped

SEQ ID NO: 5797 - protein, 26 aa, Homo sapiens
PTSSGCAVALSTSGRAAELAWAVLET

SEQ ID NO: 5798 - protein, 26 aa, Homo sapiens
PWCGHWTWMTSGARSVALALSPLSTY

SEQ ID NO: 5799 - protein, 26 aa, Homo sapiens
QGACGRSSAMGCRADGWGRTTSPYCM

SEQ ID NO: 5800 - protein, 26 aa, Homo sapiens
RNSSKFRDSATKGFSLLTSHLVKGTW

SEQ ID NO: 5801 - protein, 26 aa, Homo sapiens
RRMIWTSLPNLPDSSSALTQRQTNAM

SEQ ID NO: 5802 - protein, 26 aa, Homo sapiens
SRPELMPHTFSKSPSTSGICSPTWST

SEQ ID NO: 5803 - protein, 26 aa, Homo sapiens
TFPVYQKSRNLQRDKIQETFAQKRIK

SEQ ID NO: 5804 - protein, 25 aa, Homo sapiens
CPAHPQDPNPQVPQQEAALRPMPVL

SEQ ID NO: 5805 - protein, 25 aa, Homo sapiens
DAGARLQGCAPSLPAALPRGRHPLL

SEQ ID NO: 5806 - skipped

SEQ ID NO: 5807 - protein, 25 aa, Homo sapiens
GIYWFSHPNHPHSLPLSPGPAWTSI

SEQ ID NO: 5808 - protein, 25 aa, Homo sapiens
GRATCGAPRHARHYPAATGGRGLPV

SEQ ID NO: 5809 - protein, 25 aa, Homo sapiens
GRVPARRLPVPGAAHRFASQFQAHP

SEQ ID NO: 5810 - skipped

SEQ ID NO: 5811 - protein, 25 aa, Homo sapiens
RVGWGSWGCLLCQPPASLARWLRRR

SEQ ID NO: 5812 - protein, 25 aa, Homo sapiens
TSTPPCSSFGGWTSPNSSLTSPGIS

SEQ ID NO: 5813 - protein, 25 aa, Homo sapiens
WATDPCQGHRPRRGAAAPTVCVAGG

SEQ ID NO: 5814 - protein, 24 aa, Homo sapiens
AWASYTTSRRATPCAPSPAATAKP

SEQ ID NO: 5815 - protein, 24 aa, Homo sapiens
GDVCGNAGPETSVAERELERDLLG

SEQ ID NO: 5816 - skipped

SEQ ID NO: 5817 - protein, 24 aa, Homo sapiens
GHSQPPLSLAITAASDSSSSANSV

SEQ ID NO: 5818 - protein, 24 aa, Homo sapiens
GRAGGEEQASHSALELVGFLPFVL

SEQ ID NO: 5819 - protein, 24 aa, Homo sapiens
GVQVHWARRQWPQGQWQVEPKVMH

SEQ ID NO: 5820 - protein, 24 aa, Homo sapiens
HLLVFTPKPSSFSPSQPWPCLDLD

SEQ ID NO: 5821 - protein, 24 aa, Homo sapiens
LCHLRVWRQPHQPLLGDQRHTLLH

SEQ ID NO: 5822 - protein, 24 aa, Homo sapiens
RHPPGSTRYPSFPLRLVPLSLIGP

SEQ ID NO: 5823 - protein, 24 aa, Homo sapiens
RPASGAQAGAGRWPASASRWSLRR

SEQ ID NO: 5824 - protein, 24 aa, Homo sapiens
RRATSAVPPAVPGDLPLNLLCLEA

SEQ ID NO: 5825 - protein, 24 aa, Homo sapiens
SAVCSPITTTPTVPQEVSLKILLA

SEQ ID NO: 5826 - protein, 24 aa, Homo sapiens
SGSSTRPKSPGPPAGSSTQAHASV

SEQ ID NO: 5827 - protein, 24 aa, Homo sapiens
TGHLWSPSTCPTLPCCNWRARPPC

SEQ ID NO: 5828 - protein, 24 aa, Homo sapiens
TLRHPRAVPSAAGPLRTPHSHPQA

SEQ ID NO: 5829 - protein, 24 aa, Homo sapiens
WQLAGPMLAGWRSLGSWFCRMYGI

SEQ ID NO: 5830 - protein, 23 aa, Homo sapiens
ADRGCGPGRRRAVQGSPERGLRP

SEQ ID NO: 5831 - protein, 23 aa, Homo sapiens
EPGNRFSGCTVEQFWWRGGPRNL

SEQ ID NO: 5832 - protein, 23 aa, Homo sapiens
GQWEREAGQPQCQRTKDTPKLCC

SEQ ID NO: 5833 - protein, 23 aa, Homo sapiens
LAACSLGPCWYWNCIPRAPCATT

SEQ ID NO: 5834 - protein, 23 aa, Homo sapiens
LAPAPVRTPRVLGEQVQGAPSPW

SEQ ID NO: 5835 - protein, 23 aa, Homo sapiens
PGIGEWGAWGPWRASRWRRPRWG

SEQ ID NO: 5836 - skipped

SEQ ID NO: 5837 - protein, 23 aa, Homo sapiens
RGLFSLPEPLGSRSRRRPDPSRP

SEQ ID NO: 5838 - protein, 23 aa, Homo sapiens
RRRTRGARAWLTTTRTRRSIWRT

SEQ ID NO: 5839 - protein, 23 aa, Homo sapiens
SVGCLGCPGSRLPRSAPSPMSMR

SEQ ID NO: 5840 - protein, 23 aa, Homo sapiens
VPGPQPLHGPLLNICPCHLSGAL

SEQ ID NO: 5841 - protein, 22 aa, Homo sapiens
DAHQRRHPEHEQRTQGQGEGRL

SEQ ID NO: 5842 - protein, 22 aa, Homo sapiens
GEFLIPQYRQPRLQAGRTGNKE

SEQ ID NO: 5843 - protein, 22 aa, Homo sapiens
GLGGGDRACRLRVCQHTGPAGV

SEQ ID NO: 5844 - protein, 22 aa, Homo sapiens
GLLQPKPWQQQPVLVELLLRCL

SEQ ID NO: 5845 - protein, 22 aa, Homo sapiens
GPGYLLCGLCCPDVLFCLMGLY

SEQ ID NO: 5846 - protein, 22 aa, Homo sapiens
GPQPLGLERAVHLDSQTQPGVP

SEQ ID NO: 5847 - protein, 22 aa, Homo sapiens
LWDPTNGSTLADEKMRLHGQSM

SEQ ID NO: 5848 - protein, 22 aa, Homo sapiens
LWSQCQLKRMRQMTHQLASSPT

SEQ ID NO: 5849 - protein, 22 aa, Homo sapiens
MASPRLHLRDWLLGWKQGKAWR

SEQ ID NO: 5850 - protein, 22 aa, Homo sapiens
PGPEFQHCPPEGGARDGVCPGK

SEQ ID NO: 5851 - protein, 22 aa, Homo sapiens
PSFPLLFLASWLTSCYFFLEEK

SEQ ID NO: 5852 - protein, 22 aa, Homo sapiens
RPPSPLSRPGSGPPTHRFQPLS

SEQ ID NO: 5853 - protein, 22 aa, Homo sapiens
SHPSAAPRSSSRPPPHTASTIS

SEQ ID NO: 5854 - protein, 22 aa, Homo sapiens
TAGTPAPPPVPTCSPRTLRCLP

SEQ ID NO: 5855 - protein, 22 aa, Homo sapiens
WRRRLGRWWGRGRRVGGRRRRW

SEQ ID NO: 5856 - protein, 21 aa, Homo sapiens
AGLRARSAARGAVRRPTASSP

SEQ ID NO: 5857 - protein, 21 aa, Homo sapiens
AQAARIRAARETRSGRPGWGA

SEQ ID NO: 5858 - protein, 21 aa, Homo sapiens
GGRSGRGAQGGPHPGGEPREC

SEQ ID NO: 5859 - protein, 21 aa, Homo sapiens
GPLPRGHGAVPVSAGEDWGRL

SEQ ID NO: 5860 - skipped

SEQ ID NO: 5861 - protein, 21 aa, Homo sapiens
GWSNSCNVSRLHFRFEAKRNH

SEQ ID NO: 5862 - protein, 21 aa, Homo sapiens
HFQGVQGELGAARGLGGEAHS

SEQ ID NO: 5863 - protein, 21 aa, Homo sapiens
HPNLSTPTSHTLILRLTCCPP

SEQ ID NO: 5864 - protein, 21 aa, Homo sapiens
LLLPLQDSGGPGARRAGGDHL

SEQ ID NO: 5865 - protein, 21 aa, Homo sapiens
MWSRDCPSRCAAPTGPSTRAL

SEQ ID NO: 5866 - protein, 21 aa, Homo sapiens
PGAGAAGALRARLLPHAASQR

SEQ ID NO: 5867 - protein, 21 aa, Homo sapiens
RSGHLNVCLWVKWLRRSERCA

SEQ ID NO: 5868 - protein, 21 aa, Homo sapiens
SFILSYRWLSLFDFLSVGPMS

SEQ ID NO: 5869 - protein, 21 aa, Homo sapiens
TQGPCSCCPGYRPRASPAARS

SEQ ID NO: 5870 - protein, 21 aa, Homo sapiens
TQGRARAPATATCLHPLTIGP

SEQ ID NO: 5871 - protein, 21 aa, Homo sapiens
VHPGLVLLLPLPLCCLWLSCV

SEQ ID NO: 5872 - protein, 21 aa, Homo sapiens
WPRPCASWLQETTTGSQSSGP

SEQ ID NO: 5873 - protein, 21 aa, Homo sapiens
WSEKPSQMQMTLAYSSRWTWM

SEQ ID NO: 5874 - protein, 20 aa, Homo sapiens
EEIQGCQTTDVQKVQTKGQR

SEQ ID NO: 5875 - protein, 20 aa, Homo sapiens
GAAGERTDPGQAAGVRAEHQ

SEQ ID NO: 5876 - protein, 20 aa, Homo sapiens
GEWAALGPCWKSACRASRSA

SEQ ID NO: 5877 - protein, 20 aa, Homo sapiens
GPHRQPHLACQDERRTGQGH

SEQ ID NO: 5878 - protein, 20 aa, Homo sapiens
GRAHGEARGAGPRVQVRQWQ

SEQ ID NO: 5879 - protein, 20 aa, Homo sapiens
GRRARGGRRGWRRCELRLRP

SEQ ID NO: 5880 - protein, 20 aa, Homo sapiens
LHSFYHTGGSHCSTSFLWAQ

SEQ ID NO: 5881 - protein, 20 aa, Homo sapiens
LLTGPAWSLTLSTRAPGCPC

SEQ ID NO: 5882 - protein, 20 aa, Homo sapiens
PPWWQLWAPVWLMQSQRRME

SEQ ID NO: 5883 - protein, 20 aa, Homo sapiens
SVLPSLSRFPGNQSQESSAR

SEQ ID NO: 5884 - protein, 20 aa, Homo sapiens
TWGLLTLVYPWKCPCGWRLT

SEQ ID NO: 5885 - protein, 19 aa, Homo sapiens
AAAAGCGPHVLLVAAGQPG

SEQ ID NO: 5886 - protein, 19 aa, Homo sapiens
ALAPRRERAPCERQRLPQS

SEQ ID NO: 5887 - protein, 19 aa, Homo sapiens
AWKSIFRLYSRAVLVERGP

SEQ ID NO: 5888 - protein, 19 aa, Homo sapiens
CRGYTSCRCRAPRTSGRCG

SEQ ID NO: 5889 - skipped

SEQ ID NO: 5890 - protein, 19 aa, Homo sapiens
GDIPRGLPGIHLFPSGWYL

SEQ ID NO: 5891 - protein, 19 aa, Homo sapiens
GGSLCNHEQQVGRDQWGQV

SEQ ID NO: 5892 - protein, 19 aa, Homo sapiens
GHACLGRGTPYPATATAAP

SEQ ID NO: 5893 - protein, 19 aa, Homo sapiens
GQQSAPQSPPPPRSPRRSL

SEQ ID NO: 5894 - protein, 19 aa, Homo sapiens
HVNPKERKASPRSWAAGSP

SEQ ID NO: 5895 - protein, 19 aa, Homo sapiens
PAAPGAVQQLQPPKRTAPW

SEQ ID NO: 5896 - protein, 19 aa, Homo sapiens
TSSSPAWTPPRPSRSSVRK

SEQ ID NO: 5897 - protein, 18 aa, Homo sapiens
AEAGAQGCRRGGHLPVGE

SEQ ID NO: 5898 - protein, 18 aa, Homo sapiens
ARPSARSFCPSSSATGGA

SEQ ID NO: 5899 - protein, 18 aa, Homo sapiens
CFYYQSWPQSSILYTTLC

SEQ ID NO: 5900 - protein, 18 aa, Homo sapiens
ECQDHHGSHTGASFSQLR

SEQ ID NO: 5901 - protein, 18 aa, Homo sapiens
GGMRMSSGRWWWSARTVS

SEQ ID NO: 5902 - protein, 18 aa, Homo sapiens
GLPHQVPENATAHHEPDL

SEQ ID NO: 5903 - protein, 18 aa, Homo sapiens
IPHLPEGRKSNRVQLMSV

SEQ ID NO: 5904 - protein, 18 aa, Homo sapiens
MAPSSAAADQDSGCWMTW

SEQ ID NO: 5905 - protein, 18 aa, Homo sapiens
MFVLNPCLPSIMLTSHNM

SEQ ID NO: 5906 - protein, 18 aa, Homo sapiens
RAPQKKVRSISLTFTEIP

SEQ ID NO: 5907 - protein, 18 aa, Homo sapiens
RCQGAQPAFLCPPPLSAP

SEQ ID NO: 5908 - protein, 18 aa, Homo sapiens
RMGVAAAWRVDSAAPVMG

SEQ ID NO: 5909 - protein, 18 aa, Homo sapiens
TLQPRGSAGARPPAGLST

SEQ ID NO: 5910 - protein, 18 aa, Homo sapiens
VAGEENEGPPRPSLMCPR

SEQ ID NO: 5911 - protein, 18 aa, Homo sapiens
VREEEGAEGPAFPAKVAG

SEQ ID NO: 5912 - protein, 18 aa, Homo sapiens
VVLPTPHRPDQGGGSGRR

SEQ ID NO: 5913 - protein, 17 aa, Homo sapiens
APECLPPVWGQPLPEES

SEQ ID NO: 5914 - protein, 17 aa, Homo sapiens
APSSPRLGWSRSTAGGR

SEQ ID NO: 5915 - protein, 17 aa, Homo sapiens
DGGALGEAGRGRRKCAK

SEQ ID NO: 5916 - protein, 17 aa, Homo sapiens
DWCCAPDSVPDCGRLGV

SEQ ID NO: 5917 - protein, 17 aa, Homo sapiens
FLPPVSWPRASACVPSP

SEQ ID NO: 5918 - protein, 17 aa, Homo sapiens
FWINLASRVISTTPATA

SEQ ID NO: 5919 - protein, 17 aa, Homo sapiens
GHLHHQRGRRHDLRGAL

SEQ ID NO: 5920 - protein, 17 aa, Homo sapiens
GLRGEPEPLLLPHVCTL

SEQ ID NO: 5921 - protein, 17 aa, Homo sapiens
HCWCCCFWLGGPWPSSC

SEQ ID NO: 5922 - protein, 17 aa, Homo sapiens
LPAPSQAAADELDRRPG

SEQ ID NO: 5923 - protein, 17 aa, Homo sapiens
LSPPDRLGLWLPRGPAT

SEQ ID NO: 5924 - protein, 17 aa, Homo sapiens
LWDPSRRRTTTVPISTS

SEQ ID NO: 5925 - protein, 17 aa, Homo sapiens
PFALWDAVCILHHQVHC

SEQ ID NO: 5926 - protein, 17 aa, Homo sapiens
PPMPMPGQREAPGRQEA

SEQ ID NO: 5927 - protein, 17 aa, Homo sapiens
QLRLMLPSSARPWGPDG

SEQ ID NO: 5928 - protein, 17 aa, Homo sapiens
RALCLAPPLHPSLPAAL

SEQ ID NO: 5929 - protein, 17 aa, Homo sapiens
REIQANSEIQPPRGSAY

SEQ ID NO: 5930 - protein, 17 aa, Homo sapiens
RPSPLGPPSMASRSVAG

SEQ ID NO: 5931 - protein, 17 aa, Homo sapiens
RRGKPTRVLCWMWAASG

SEQ ID NO: 5932 - protein, 16 aa, Homo sapiens
APVRQAPYDFASYPIF

SEQ ID NO: 5933 - protein, 16 aa, Homo sapiens
CRCQSRLFETGHRFVL

SEQ ID NO: 5934 - protein, 16 aa, Homo sapiens
GPCSQGGALGPGLLPG

SEQ ID NO: 5935 - protein, 16 aa, Homo sapiens
GRLPLPPGTHPLLADL

SEQ ID NO: 5936 - protein, 16 aa, Homo sapiens
GTQHIHHGVDHRQDPF

SEQ ID NO: 5937 - protein, 16 aa, Homo sapiens
GWLLPLRLPTRIPAAG

SEQ ID NO: 5938 - protein, 16 aa, Homo sapiens
HPGDPLSGSWLPSPRN

SEQ ID NO: 5939 - protein, 16 aa, Homo sapiens
IGSSRRCLLPTTGLPP

SEQ ID NO: 5940 - protein, 16 aa, Homo sapiens
MARPGWPWPQTSVTSA

SEQ ID NO: 5941 - protein, 16 aa, Homo sapiens
PGWGWPLHGGWTQRPP

SEQ ID NO: 5942 - protein, 16 aa, Homo sapiens
SREAEGSKTSGTFCSR

SEQ ID NO: 5943 - protein, 15 aa, Homo sapiens
APMMSSMACGSAESS

SEQ ID NO: 5944 - protein, 15 aa, Homo sapiens
AWHRAGGGALPTADP

SEQ ID NO: 5945 - protein, 15 aa, Homo sapiens
CRRAPGPRAWGGRAR

SEQ ID NO: 5946 - protein, 15 aa, Homo sapiens
GCGTPQTAAPWPTRR

SEQ ID NO: 5947 - protein, 15 aa, Homo sapiens
GCRGAVRCLDDKWTV

SEQ ID NO: 5948 - protein, 15 aa, Homo sapiens
GLCKCPRMPLQPPGP

SEQ ID NO: 5949 - protein, 15 aa, Homo sapiens
GRRGIGGGRGGGGGG

SEQ ID NO: 5950 - protein, 15 aa, Homo sapiens
GSYPPGFLGGHLRCE

SEQ ID NO: 5951 - protein, 15 aa, Homo sapiens
HQGRPRHPGGAAPDT

SEQ ID NO: 5952 - protein, 15 aa, Homo sapiens
LSPTCVEAASSALAG

SEQ ID NO: 5953 - protein, 15 aa, Homo sapiens
MSWMSRASRKTLRKS

SEQ ID NO: 5954 - protein, 15 aa, Homo sapiens
PPSTSPPRGWGLQVE

SEQ ID NO: 5955 - protein, 15 aa, Homo sapiens
RLQCLGPRVWAAPEA

SEQ ID NO: 5956 - protein, 15 aa, Homo sapiens
RPIGPGCARGTASWR

SEQ ID NO: 5957 - protein, 15 aa, Homo sapiens
SLPRACPWAWKALLG

SEQ ID NO: 5958 - protein, 15 aa, Homo sapiens
SPTCRMWWSRQSSGC

SEQ ID NO: 5959 - protein, 15 aa, Homo sapiens
WHLREVGTHFWEAEG

SEQ ID NO: 5960 - protein, 15 aa, Homo sapiens
WQAVGACPSMGSLGG

SEQ ID NO: 5961 - protein, 14 aa, Homo sapiens
ADPGPWQPSVGCAD

SEQ ID NO: 5962 - protein, 14 aa, Homo sapiens
AVGEHHGGGREAIF

SEQ ID NO: 5963 - protein, 14 aa, Homo sapiens
DRQRAGDHAGHSAG

SEQ ID NO: 5964 - protein, 14 aa, Homo sapiens
ELFQCTNFLFLKEK

SEQ ID NO: 5965 - protein, 14 aa, Homo sapiens
GHHHWTGVNHLSQW

SEQ ID NO: 5966 - protein, 14 aa, Homo sapiens
GLPHSSRPSRQLLY

SEQ ID NO: 5967 - protein, 14 aa, Homo sapiens
GTGRSCSESYSGCT

SEQ ID NO: 5968 - protein, 14 aa, Homo sapiens
LSSGSPSSAKTSHA

SEQ ID NO: 5969 - protein, 14 aa, Homo sapiens
RSGLRPWQAARGPR

SEQ ID NO: 5970 - protein, 14 aa, Homo sapiens
SVWLPLGLPAGHCQ

SEQ ID NO: 5971 - protein, 14 aa, Homo sapiens
TLPAPSVSCYYCCF

SEQ ID NO: 5972 - protein, 14 aa, Homo sapiens
TWRGRKTRDPPDPA

SEQ ID NO: 5973 - protein, 13 aa, Homo sapiens
AVCGFSLWCWRAV

SEQ ID NO: 5974 - protein, 13 aa, Homo sapiens
AVGGEPVQWPLQP

SEQ ID NO: 5975 - protein, 13 aa, Homo sapiens
ELTHSHDCSPEPC

SEQ ID NO: 5976 - protein, 13 aa, Homo sapiens
FLPSRFPWGPPPL

SEQ ID NO: 5977 - protein, 13 aa, Homo sapiens
GWRGRAGPGPKRV

SEQ ID NO: 5978 - protein, 13 aa, Homo sapiens
KESPGREKGMEKM

SEQ ID NO: 5979 - protein, 13 aa, Homo sapiens
PFLQPGPELLHTP

SEQ ID NO: 5980 - protein, 13 aa, Homo sapiens
PLKGLGRLLGSST

SEQ ID NO: 5981 - protein, 13 aa, Homo sapiens
QDHSPAREHPLPP

SEQ ID NO: 5982 - protein, 13 aa, Homo sapiens
SSSTTARDPPATR

SEQ ID NO: 5983 - protein, 13 aa, Homo sapiens
TQMPGPRPCWESA

SEQ ID NO: 5984 - protein, 13 aa, Homo sapiens
WPPSASPRPHSSP

SEQ ID NO: 5985 - protein, 12 aa, Homo sapiens
AAGAEHQGGAGQ

SEQ ID NO: 5986 - protein, 12 aa, Homo sapiens
ANQSWSLLRTMR

SEQ ID NO: 5987 - protein, 12 aa, Homo sapiens
ARGSWIPPFGYV

SEQ ID NO: 5988 - protein, 12 aa, Homo sapiens
ASRVPEAGQVPG

SEQ ID NO: 5989 - protein, 12 aa, Homo sapiens
AVGGGAWGDPRL

SEQ ID NO: 5990 - protein, 12 aa, Homo sapiens
CSRLTGCWGQPS

SEQ ID NO: 5991 - protein, 12 aa, Homo sapiens
DPHSPCFFWLPG

SEQ ID NO: 5992 - protein, 12 aa, Homo sapiens
EDPLRVSAGAPG

SEQ ID NO: 5993 - protein, 12 aa, Homo sapiens
GHQGWIQHKCGL

SEQ ID NO: 5994 - protein, 12 aa, Homo sapiens
GPDVPHPGQRPL

SEQ ID NO: 5995 - protein, 12 aa, Homo sapiens
GPQCPMCQGPLR

SEQ ID NO: 5996 - protein, 12 aa, Homo sapiens
GTPTSQPPQVTP

SEQ ID NO: 5997 - protein, 12 aa, Homo sapiens
IPASMPPTNFPT

SEQ ID NO: 5998 - protein, 12 aa, Homo sapiens
LAPCRGWCASYS

SEQ ID NO: 5999 - protein, 12 aa, Homo sapiens
MRMMMRRTRTSC

SEQ ID NO: 6000 - protein, 12 aa, Homo sapiens
QQRSRKAIFQFF

SEQ ID NO: 6001 - protein, 12 aa, Homo sapiens
RLRSWGRRRGAS

SEQ ID NO: 6002 - protein, 12 aa, Homo sapiens
SGPPTPSWGGCT

SEQ ID NO: 6003 - protein, 12 aa, Homo sapiens
VTHPLYCLIVGN

SEQ ID NO: 6004 - protein, 12 aa, Homo sapiens
WASHSSRDSSVP

SEQ ID NO: 6005 - protein, 12 aa, Homo sapiens
WPRASRWCTSTL

SEQ ID NO: 6006 - protein, 11 aa, Homo sapiens
AAQLLWALGGC

SEQ ID NO: 6007 - protein, 11 aa, Homo sapiens
AHFKRRVSIQL

SEQ ID NO: 6008 - protein, 11 aa, Homo sapiens
APCTTPPAWRS

SEQ ID NO: 6009 - protein, 11 aa, Homo sapiens
APHEAHYLHLQ

SEQ ID NO: 6010 - protein, 11 aa, Homo sapiens
AQYLLRSKKED

SEQ ID NO: 6011 - protein, 11 aa, Homo sapiens
DGCDHTSTPPA

SEQ ID NO: 6012 - protein, 11 aa, Homo sapiens
GGGGHGGRGPG

SEQ ID NO: 6013 - protein, 11 aa, Homo sapiens
GPILIAGASRE

SEQ ID NO: 6014 - protein, 11 aa, Homo sapiens
GPLAAETQASC

SEQ ID NO: 6015 - protein, 11 aa, Homo sapiens
GVRGCRGRQDL

SEQ ID NO: 6016 - protein, 11 aa, Homo sapiens
HDCLANCHLLS

SEQ ID NO: 6017 - protein, 11 aa, Homo sapiens
HLAPTPLLFAG

SEQ ID NO: 6018 - protein, 11 aa, Homo sapiens
LAMPVHPGQRW

SEQ ID NO: 6019 - protein, 11 aa, Homo sapiens
LGARNGAGTPG

SEQ ID NO: 6020 - protein, 11 aa, Homo sapiens
PAGSGSDTQRD

SEQ ID NO: 6021 - protein, 11 aa, Homo sapiens
PGAGGIRLDLA

SEQ ID NO: 6022 - protein, 11 aa, Homo sapiens
PPSAPMPSTSQ

SEQ ID NO: 6023 - protein, 11 aa, Homo sapiens
PRVLDPPFWLR

SEQ ID NO: 6024 - protein, 11 aa, Homo sapiens
QPTRAGHSSGP

SEQ ID NO: 6025 - protein, 11 aa, Homo sapiens
RSSRAVCGGRI

SEQ ID NO: 6026 - protein, 11 aa, Homo sapiens
SSSKCTLAALR

SEQ ID NO: 6027 - protein, 11 aa, Homo sapiens
TAQATTPRVPR

SEQ ID NO: 6028 - protein, 11 aa, Homo sapiens
TWRPTWRPPTT

SEQ ID NO: 6029 - protein, 11 aa, Homo sapiens
YGGQWPWAQTA

SEQ ID NO: 6030 - protein, 10 aa, Homo sapiens
ALSDMPGSLP

SEQ ID NO: 6031 - protein, 10 aa, Homo sapiens
EEPLHRVCGR

SEQ ID NO: 6032 - protein, 10 aa, Homo sapiens
GGQDCAPRAL

SEQ ID NO: 6033 - protein, 10 aa, Homo sapiens
GRAEETVTGV

SEQ ID NO: 6034 - protein, 10 aa, Homo sapiens
LISSNPWKTQ

SEQ ID NO: 6035 - protein, 10 aa, Homo sapiens
LTPAGRPRSP

SEQ ID NO: 6036 - protein, 10 aa, Homo sapiens
PASCPAAACP

SEQ ID NO: 6037 - protein, 10 aa, Homo sapiens
PCWPRLWPMG

SEQ ID NO: 6038 - protein, 10 aa, Homo sapiens
PGPRSPHRCR

SEQ ID NO: 6039 - protein, 10 aa, Homo sapiens
PLLRGSALQP

SEQ ID NO: 6040 - protein, 10 aa, Homo sapiens
PQRPLQICTC

SEQ ID NO: 6041 - protein, 10 aa, Homo sapiens
PRLRAGALWP

SEQ ID NO: 6042 - protein, 10 aa, Homo sapiens
PTMPHVPRAT

SEQ ID NO: 6043 - protein, 10 aa, Homo sapiens
RCAQTREKTL

SEQ ID NO: 6044-6045 - skipped (2 entries)

SEQ ID NO: 6046 - protein, 9 aa, Homo sapiens
CQYLRCGVK

SEQ ID NO: 6047 - protein, 9 aa, Homo sapiens
DPRILHARC

SEQ ID NO: 6048 - protein, 9 aa, Homo sapiens
DSSRAPPGA

SEQ ID NO: 6049 - protein, 9 aa, Homo sapiens
FALEAWTPR

SEQ ID NO: 6050 - protein, 9 aa, Homo sapiens
FSLPTTELC

SEQ ID NO: 6051 - protein, 9 aa, Homo sapiens
FWLSLLYWP

SEQ ID NO: 6052 - skipped

SEQ ID NO: 6053 - protein, 9 aa, Homo sapiens
GCHSGGSAQ

SEQ ID NO: 6054 - protein, 9 aa, Homo sapiens
GCQDCEIHV

SEQ ID NO: 6055-6056 - skipped (2 entries)

SEQ ID NO: 6057 - protein, 9 aa, Homo sapiens
LRTGPCAKP

SEQ ID NO: 6058 - protein, 9 aa, Homo sapiens
LRTNPGENP

SEQ ID NO: 6059 - protein, 9 aa, Homo sapiens
PCPQSSGGG

SEQ ID NO: 6060 - protein, 9 aa, Homo sapiens
PQWCGWVRY

SEQ ID NO: 6061 - protein, 9 aa, Homo sapiens
RTGLRPPCP

SEQ ID NO: 6062 - skipped

SEQ ID NO: 6063 - protein, 9 aa, Homo sapiens
TASRTYSVC

SEQ ID NO: 6064 - protein, 9 aa, Homo sapiens
THLVAAPHI

SEQ ID NO: 6065 - protein, 9 aa, Homo sapiens
TRNSAPRTR

SEQ ID NO: 6066 - protein, 8 aa, Homo sapiens
AQGTGGGD

SEQ ID NO: 6067 - protein, 8 aa, Homo sapiens
AWFIWGQR

SEQ ID NO: 6068 - protein, 8 aa, Homo sapiens
DRECRGRR

SEQ ID NO: 6069 - protein, 8 aa, Homo sapiens
ETLLLELS

SEQ ID NO: 6070 - protein, 8 aa, Homo sapiens
GGSPRSTQ

SEQ ID NO: 6071 - protein, 8 aa, Homo sapiens
GVSTCAVE

SEQ ID NO: 6072 - protein, 8 aa, Homo sapiens
GWRLPDST

SEQ ID NO: 6073 - protein, 8 aa, Homo sapiens
LRLRQEAE

SEQ ID NO: 6074 - protein, 8 aa, Homo sapiens
MEQFLQCI

SEQ ID NO: 6075 - protein, 8 aa, Homo sapiens
MGFLTSIT

SEQ ID NO: 6076 - protein, 8 aa, Homo sapiens
RWPAPQAA

SEQ ID NO: 6077 - skipped

SEQ ID NO: 6078 - protein, 8 aa, Homo sapiens
TPHSKEPL

SEQ ID NO: 6079 - protein, 98 aa, Homo sapiens
AWRARARPASTRPAMGSSRVPSTCTARPLSRTSPGCVPATPPRRRAPRSRGTRTWRPRVTSGSTPGCEAQELTANEAARPTPATRPWSWRKNFTTIAT

SEQ ID NO: 6080 - protein, 97 aa, Homo sapiens
VAAAAAAAEAGAGVVGAAGNPPPPPPPPPPPPPRRSSPPAVAAAAAAAAAGPACTTETTPRGWGKLAARQSRRCKWQILISSPPYPLNTADLWRGNA

SEQ ID NO: 6081 - protein, 95 aa, Homo sapiens
GTCPECSPSAAPCTALRCPSGPALSQRPPGGPGRPLPPGAGGHSDGGGGGGGGRTVGGCPVPTAGCLRSPALFSVPCCLQGQQPPQQLQHGRGVL

SEQ ID NO: 6082 - protein, 90 aa, Homo sapiens
GPGAGALPEARAEAARVHLPPRPRALPHCQRLPGRAELRVPAGWGRRGRGGGRARTASPPTGVGAWGSCPHPLQHHGVIPCCAPHLVGGV

SEQ ID NO: 6083 - protein, 89 aa, Homo sapiens
GRRPRAAGRPPAAGPAAAARGAPGRPDGGPRSADAPAPHRPQRGERRQALRSLQRGRAAPEGQQQHHGVCSRAHLRARGRDRGQARLQD

SEQ ID NO: 6084 - protein, 80 aa, Homo sapiens
GRGRRRGRRRRLPVVHQPPGPAGHQALGGGAAGRPRRRAARARRPAAAASAAATATAAATAATAAAAAATAAAASGAPRR

SEQ ID NO: 6085 - protein, 79 aa, Homo sapiens
GWRRRRRRRRRGRGWWGRQEILLRRRLLLRLLLLGDPPRRRWRRRRRRRQQDQHAPPKRLPEAGESWLPARAVVANGKY

SEQ ID NO: 6086 - protein, 75 aa, Homo sapiens
GVPLAPGESHRGARRGQGAVQQPAGARASKGQGHSGNLPHPSAVHEGHAAEVCGRHLPGHSQREPAHPHRRQVPV

SEQ ID NO: 6087 - protein, 72 aa, Homo sapiens
GAVRWLPESQHHGSAPRLPGHSLRPALPGAKCRERGRDGRVDAASLPGCVQRGHPPGRSSQPLHTLLPGPHG

SEQ ID NO: 6088 - protein, 69 aa, Homo sapiens
GHGPWAARPRPASQSGQEPAAALALWGWRTGLACGLPPCWRSWWQGRGGEGAWVGAHQGPGHGGPQDAP

SEQ ID NO: 6089 - protein, 61 aa, Homo sapiens
GGRHEASGRSRSRGCSTHCTQCPDPQPLGSYIACRTACWGRSRSPQTDATSTTLSSRQRAF

SEQ ID NO: 6090 - protein, 61 aa, Homo sapiens
VAPRCPRSAVDISPGPTSPSLASCASVAIGKLALLGASAPCGAAGAREAGRFAVLGTMVMK

SEQ ID NO: 6091 - protein, 60 aa, Homo sapiens
GGRHEASGRSRSRGCSTHCTQCPDPQPLGSYIACRTACWGRSRSPQTDATSTTLSRQRAF

SEQ ID NO: 6092 - skipped

SEQ ID NO: 6093 - protein, 59 aa, Homo sapiens
GWLLGAPGALWTSPPAQHHPVLPAAPLWPLGSWLSLEPVLRAVRPGPEKPAGSLCWEQW

SEQ ID NO: 6094 - protein, 58 aa, Homo sapiens
GPCSGELCARPCLRGIQWPEEATTVEASGGGPCPSKGRRPPWRGPGRSPEGQHMGHSL

SEQ ID NO: 6095 - protein, 57 aa, Homo sapiens
AAALRVPRRAEAGSAGTEGPGPRGHTAQQTAQGGHARQCPWARRGQASSPGKQPHPE

SEQ ID NO: 6096 - protein, 57 aa, Homo sapiens
VARVEVAAGPPMREVAEAAAVVMVVRPVATLSPGEARAPLESVRQIYSEHNYCRLIL

SEQ ID NO: 6097 - protein, 57 aa, Homo sapiens
VPAGEASVRAASAEVGDGAGGPVRPCALLLLLPLEILVFLSPTLRLLVPGRGDPILR

SEQ ID NO: 6098 - protein, 56 aa, Homo sapiens
GPGQAGKGRSSARPGGPPVDKPRIPQATEGPENGRVFPRDLPPGPQTRERGLFHLV

SEQ ID NO: 6099 - protein, 56 aa, Homo sapiens
PGEEEPAMCTSQQKARRSLWRPSKAMSSSATTCHTTPSRAALMRSHWPSAPCNATA

SEQ ID NO: 6100 - protein, 56 aa, Homo sapiens
TGTGSGCSCVGPPAALSPSRVPGTPWSRAPWRPPRKCILPPASAPSRPFRGLVARG

SEQ ID NO: 6101 - skipped

SEQ ID NO: 6102 - protein, 55 aa, Homo sapiens
GSPSRSAACGGRERRDRRPGPSRAHCPANGAGWPCPAVPLGPARTGLLPGEAAPS

SEQ ID NO: 6103 - protein, 53 aa, Homo sapiens
RPPCPPGRGLPLTLSALPLRCPRAPTAPRPGSPADRVRQVHPVLRAPGPPSTS

SEQ ID NO: 6104 - protein, 48 aa, Homo sapiens
AALTSSAISGPGWTPRPPTFLSPWPSPAIPLLTPRMSWCSSLTTWPNS

SEQ ID NO: 6105 - protein, 44 aa, Homo sapiens
VGAQLMAPLSPGATLTSTSCSTMSCLSRPGWAALQRLTWVCRRP

SEQ ID NO: 6106 - protein, 43 aa, Homo sapiens
DLPRMLPISSPLHRPQMPFWTCTFPATTWGTWETPSTWGWRTF

SEQ ID NO: 6107 - protein, 43 aa, Homo sapiens
GPPGALRHPRGTPPGPENNLGVYTEARLGLQQGESHLSPLEPG

SEQ ID NO: 6108 - protein, 40 aa, Homo sapiens
PADPWGLGVQPACSELPCRWRRPSWSPACWGSCCCPSWPC

SEQ ID NO: 6109 - protein, 40 aa, Homo sapiens
RPPCPPGRGLPLTLSALPLRCPRAPTAPRPGSPESLSVTP

SEQ ID NO: 6110 - protein, 39 aa, Homo sapiens
TRGTGWPLAGQQPGSCPSQHQGLPGRLPPPRPLQRVRHT

SEQ ID NO: 6111 - protein, 38 aa, Homo sapiens
GPGQQALPCLRGDRHHAYPPGCAPGDWGGVRGRSEPSL

SEQ ID NO: 6112 - protein, 38 aa, Homo sapiens
GPVPGHGGPGGKALPHRQDPCGQNPGGPGGRVLEPLPD

SEQ ID NO: 6113 - skipped

SEQ ID NO: 6114 - protein, 36 aa, Homo sapiens
ACTGTWGPRGEGPPSSPGSLWPESWGTRRKSPGAPP

SEQ ID NO: 6115 - protein, 33 aa, Homo sapiens
ARRRGRQDGGRGRRRPPGPDHRGPEGRQQSGVR

SEQ ID NO: 6116 - protein, 32 aa, Homo sapiens
GGTRAGPGPGASGCVHQEAERVSQAHRGRTGQ

SEQ ID NO: 6117 - protein, 32 aa, Homo sapiens
GLRPQEGPGRHPFRRRAAGGCGPSRVRGEAEL

SEQ ID NO: 6118 - skipped

SEQ ID NO: 6119 - protein, 30 aa, Homo sapiens
SRPGWKRTQQRPPWRTSRGQAQDTSGHRGS

SEQ ID NO: 6120 - protein, 29 aa, Homo sapiens
GHGGPERGRRLRGRLWARAEFLQHALRAL

SEQ ID NO: 6121 - skipped

SEQ ID NO: 6122 - protein, 28 aa, Homo sapiens
AQRGSLCLSPCDPKSAGKMRLLLRPGGT

SEQ ID NO: 6123 - protein, 26 aa, Homo sapiens
GRERRSRRCAPANKRQGGVCGDLQRQ

SEQ ID NO: 6124 - protein, 26 aa, Homo sapiens
TLAIRFISAPQPSSSTVTAAPSGQYF

SEQ ID NO: 6125 - protein, 25 aa, Homo sapiens
GLLHAVQEKLEEALVCPPPVQADVL

SEQ ID NO: 6126 - protein, 23 aa, Homo sapiens
APARRPDAAVPPVRPLPARPGLL

SEQ ID NO: 6127 - protein, 23 aa, Homo sapiens
ASPSPSRNKSELLTSPRPLTLQS

SEQ ID NO: 6128 - protein, 23 aa, Homo sapiens
PARGTTSSTGNASGTRKQPWSVH

SEQ ID NO: 6129 - protein, 22 aa, Homo sapiens
GRVAHSPASCCARARATATGGL

SEQ ID NO: 6130 - protein, 22 aa, Homo sapiens
PGQAAGRGGTTCPPTSCPSWSP

SEQ ID NO: 6131 - skipped

SEQ ID NO: 6132 - protein, 21 aa, Homo sapiens
APPRCPGEIGRSAGLSSASPS

SEQ ID NO: 6133 - protein, 21 aa, Homo sapiens
PCCSQPCVLLRQGPRHRHRRP

SEQ ID NO: 6134 - protein, 19 aa, Homo sapiens
AFWKPPSQGISSCLMTGCW

SEQ ID NO: 6135 - protein, 19 aa, Homo sapiens
AKAQEVGKDPMVMVNVENL

SEQ ID NO: 6136 - protein, 18 aa, Homo sapiens
RHPSWPWTRCLRMRPPRS

SEQ ID NO: 6137 - protein, 18 aa, Homo sapiens
VLQVHCLVTVTGYSLCLR

SEQ ID NO: 6138 - protein, 17 aa, Homo sapiens
GCPGHLQEECAESHRAG

SEQ ID NO: 6139 - protein, 17 aa, Homo sapiens
GRPPCPGRRPPATAHLL

SEQ ID NO: 6140 - protein, 16 aa, Homo sapiens
GRGQARGAAVWDRQQP

SEQ ID NO: 6141 - protein, 16 aa, Homo sapiens
PPPLSRETPPSHSPPA

SEQ ID NO: 6142 - protein, 15 aa, Homo sapiens
GWGPNLWPPSALGPP

SEQ ID NO: 6143 - protein, 15 aa, Homo sapiens
PCRRSQCTSCKCRSR

SEQ ID NO: 6144 - protein, 14 aa, Homo sapiens
ALSGSPRLRESAAV

SEQ ID NO: 6145 - protein, 13 aa, Homo sapiens
GPPPPLPETSPSY

SEQ ID NO: 6146 - protein, 12 aa, Homo sapiens
APPPRQLHPPHG

SEQ ID NO: 6147 - protein, 12 aa, Homo sapiens
ELLHPSQRLLVP

SEQ ID NO: 6148 - protein, 12 aa, Homo sapiens
GAPRALQAGGFP

SEQ ID NO: 6149 - protein, 12 aa, Homo sapiens
GQRLRKWERIRW

SEQ ID NO: 6150 - protein, 12 aa, Homo sapiens
GWPGWRWRRGHR

SEQ ID NO: 6151 - protein, 12 aa, Homo sapiens
KKWGPWSLKSKG

SEQ ID NO: 6152 - protein, 11 aa, Homo sapiens
PWATGPSVPSW

SEQ ID NO: 6153 - protein, 10 aa, Homo sapiens
AECRGGEPGM

SEQ ID NO: 6154 - protein, 10 aa, Homo sapiens
AGARGEIAVM

SEQ ID NO: 6155 - protein, 10 aa, Homo sapiens
GSSSTPLRGF

SEQ ID NO: 6156 - protein, 10 aa, Homo sapiens
MLPSLTCPWP

SEQ ID NO: 6157 - skipped

SEQ ID NO: 6158 - protein, 10 aa, Homo sapiens
TKGVAVPVPV

SEQ ID NO: 6159 - protein, 8 aa, Homo sapiens
GFYKCTAW

SEQ ID NO: 6160 - protein, 8 aa, Homo sapiens
GQGGQDGH

SEQ ID NO: 6161 - protein, 8 aa, Homo sapiens
GRSGAPGA

SEQ ID NO: 6162 - protein, 76 aa, Homo sapiens
ACGRPRWRCCWGRCTGRRRAARSTTTMAGRPSRCTAAPTPSRRSALTSLPTCRSATRWATSACGCPTCWSTRAWPK

SEQ ID NO: 6163 - protein, 50 aa, Homo sapiens
GDAGCGRPPEPAGGGQAAAATEGGCLSLGLGCRQLGLLPGPAYTAPPVGV

SEQ ID NO: 6164 - skipped

SEQ ID NO: 6165 - protein, 34 aa, Homo sapiens
ARPARPCPTGHSLVQMEPLTTARPTSSSTTCPRT

SEQ ID NO: 6166 - protein, 22 aa, Homo sapiens
GVSLLLDLSLVCLSPGLHPRSS

SEQ ID NO: 6167 - protein, 19 aa, Homo sapiens
GPGRPGPAQRATPWYKWSH

SEQ ID NO: 6168 - protein, 18 aa, Homo sapiens
GAPGRRPRASPGFAWESG

SEQ ID NO: 6169 - protein, 11 aa, Homo sapiens
GRRTGRGTSWL

SEQ ID NO: 6170 - skipped

SEQ ID NO: 6171 - protein, 8 aa, Homo sapiens
RCWVWQAS

SEQ ID NO: 6172 - protein, 58 aa, Homo sapiens
LAMLSPSLTSLPAPPLYPMHSASSGSVSKKLTSMLAWPRCSLFMGSQVWSLGCSCSWL

SEQ ID NO: 6173 - skipped

SEQ ID NO: 6174 - protein, 42 aa, Homo sapiens
WDEKTVRSNVMANVLTLNLCNRLLKSFSKWSLVQLHGIIRKN

SEQ ID NO: 6175 - protein, 24 aa, Homo sapiens
FLLCVVFGKFVISRSTFRHTSCYS

SEQ ID NO: 6176 - protein, 22 aa, Homo sapiens
FALCGFWQICHIKKHFQTHKLL

SEQ ID NO: 6177 - protein, 17 aa, Homo sapiens
FHFIWMPGQFTLDRDGL

SEQ ID NO: 6178 - protein, 15 aa, Homo sapiens
FGTKRQSDQTSWQTS

SEQ ID NO: 6179 - skipped

SEQ ID NO: 6180 - protein, 14 aa, Homo sapiens
FCVCLCVCVFYFTG

SEQ ID NO: 6181 - protein, 13 aa, Homo sapiens
FLQKQITLLKMKK

SEQ ID NO: 6182 - protein, 11 aa, Homo sapiens
SLHLDAWTIYS

SEQ ID NO: 6183 - protein, 8 aa, Homo sapiens
FWPCSLPH

SEQ ID NO: 6184 - protein, 89 aa, Homo sapiens
FSSKGVRATQSHRISQVSQNSSSWDSQRIQNCSRSSLGCSCPCTWSRCWGTCSSSWLSALTPTSTPPCTSSSPTCPWLTSVSPPPRSPR

SEQ ID NO: 6185 - protein, 60 aa, Homo sapiens
FFPQKVSELHRATESHRCLRIPPPGTLRGSRTAAGPRWAVPVHVPGHGAGEPAHHPGCQL

SEQ ID NO: 6186 - protein, 25 aa, Homo sapiens
FLRWSLTLSPSWSAVVQSRLTPGFK

SEQ ID NO: 6187 - protein, 11 aa, Homo sapiens
FFSVIFSTRCL

SEQ ID NO: 6188 - protein, 10 aa, Homo sapiens
FFCYILNTMF

SEQ ID NO: 6189 - protein, 97 aa, Homo sapiens
ASGELTCHGCLCFVPFCWSSSFSLWFPIGFFTGSAFWTLGTGITRALCNMQSPLWMPSSSSITWPSSCWSSGSCSPCSRCRWSAPPMASPASTAWDT

SEQ ID NO: 6190 - protein, 91 aa, Homo sapiens
AEVSVYEAERASGGQAKASGTTQISEGKAPSDPFPEPGSGPEPESESESESEPKSECQSEPDSESDAESDSEFEPEGEPGKPEAELRQGAE

SEQ ID NO: 6191 - protein, 91 aa, Homo sapiens
QRQRQLQQRSSHSLPYSHHQCHRYWLILKTQQGILWVNQHNSATLFLDNQYHLPKSLLDNQHQLSIPLLKNQKHILLLDNHLPTTPNNQHQ

SEQ ID NO: 6192 - protein, 91 aa, Homo sapiens
YGTLYPKSSIFKKLLPIPLALERLLILLQVTKTSALWNLSGTKVFISTIALCWTVSFLESHVAQRILHMSSLNMEIVLLLIMVKLSKQREK

SEQ ID NO: 6193 - protein, 83 aa, Homo sapiens
MTFFGETGMMKKVVRIILHLLKKELICGVIYRMEQYLVLSHNVLKKLWRNIKTNVSSSLSIRAILKKIHLQQRLLNAGKNTMR

SEQ ID NO: 6194 - protein, 80 aa, Homo sapiens
LLYVHPLHHLANEFSHRKTQGIFHVLSSPDCGDHILRYHLLYVCETEVSRPDWGRKIASIRQAHFSVLWGSDTHAESYTL

SEQ ID NO: 6195 - protein, 80 aa, Homo sapiens
MKIFKLQLTSSNFPLLFCHQCPRPLRCHHLTRVPYRLHLHLKPTLENTQIPAIMTQSSLEILLSVFQKMIQLNHRIILAH

SEQ ID NO: 6196 - protein, 79 aa, Homo sapiens
PLHLSACKTTGEVPPRSSGQPGCFHLFLDWAKVKTIDVHLQMQHPVPGALRWVQNVDGVFKRISFQVDQEVNVVILFPI

SEQ ID NO: 6197 - protein, 78 aa, Homo sapiens [sequence omitted]

SEQ ID NO: 6198 - skipped

SEQ ID NO: 6199 - protein, 76 aa, Homo sapiens
GSRMSVLSFSNTSKQWKLITCGFPANSLAMIFHTMWHCALEKCVSERTYRKFLTCLPHSPRALGWIKRNCPSAHPY

SEQ ID NO: 6200 - protein, 76 aa, Homo sapiens
HQPCYPDRHIYWIFSWKYLMVGCSWLLYLCNFPGIQCIAIFEKYSNSSVSICTSDSALRAFPGTGMELHPYSLFFL

SEQ ID NO: 6201-6203 - skipped (3 entries)

SEQ ID NO: 6204 - protein, 76 aa, Homo sapiens
VAVACFGILVIWARVSASLQLAPKHLDWQISGKKFQHLDFSELILSLLSFPDALFYNCILGNIFLGRILLKKMLIA

SEQ ID NO: 6205 - protein, 76 aa, Homo sapiens
WQAADGDGSSHCSRDIESHCRENRFLSEGGSCALESAEQRDPGASRHLRRIVLPAALPGPYGQHLRGHHLPCPPGP

SEQ ID NO: 6206 - protein, 72 aa, Homo sapiens
LIQFWDWKIQKTPWFIHGLVRESVLTALLQFQVLKQSQNYLWTTNLQDSLQAIQKQLATIQILHWSYQVMRH

SEQ ID NO: 6207 - protein, 72 aa, Homo sapiens
VPMIPTMTWPHSSSTRRSLPSSSSSTRMVLSAPSLWPCSSFSISCLHVGLTAFLFQVAFLCLLCCVELLLDV

SEQ ID NO: 6208 - protein, 71 aa, Homo sapiens
QVQKRLPYSRFHDSHLPCQFNMEWDTDRMYTSCLQTARNPGTRGCESHRSSYFRLHLSVHLPSRLFPRRGI

SEQ ID NO: 6209 - protein, 70 aa, Homo sapiens
IYCTFYLSSQRGKQLQRMGNAILPCLETPTGKLVTLKRLTQFMTFQTVSSVGKKQSWWITLTQKNFLLKK

SEQ ID NO: 6210 - protein, 70 aa, Homo sapiens
QTIQPPLLLCLRFRESLWMETKHPDLECRHRYKVKSLQQTQKMMMTTMMRMMMMKKKTQRIGTPGSPRRE

SEQ ID NO: 6211 - protein, 70 aa, Homo sapiens
RKFPLKKLMADLLPVQEPMKRASKEVVGKRKTKLKLYHLNLKYNLEANKNFSFLMKKKKLEKTTPSSLAQ

SEQ ID NO: 6212 - protein, 69 aa, Homo sapiens
IKQLIKLKKHYIPIYHKPQKQTLGIPATHLPIKNPLVRNWGIPLHQILELKKNLWMMSMTKQWHHSRDY

SEQ ID NO: 6213 - protein, 68 aa, Homo sapiens
KALTGNISERDLLQYLLKSKALMIPQTSMSFQNLIFLSQQWPQVIILRLTTRTKTGSSSITRTSALRA

SEQ ID NO: 6214 - skipped

SEQ ID NO: 6215 - protein, 67 aa, Homo sapiens
PFCTAGSMPLLRCYALVTGCSIRIGGTPRHTPTIIEPGMWWSMTGYITMLTRTFSGFSPRDSNLLPC

SEQ ID NO: 6216 - protein, 66 aa, Homo sapiens
LTCILEKEPVGGPSTSPKAKSFSSTSLSLKLEVLPTVKQIMLRLVAVPFWVLLKIKSIAVQTYLHL

SEQ ID NO: 6217 - protein, 64 aa, Homo sapiens
FQCCCHLWYGYCSLLFASDHHDCAILAHIPSQQEQDKEGQEGACCQPRPRFSKSGTRKDSEAKQ

SEQ ID NO: 6218 - protein, 63 aa, Homo sapiens
KTRGQILFPCLRLLPGRLLQSCILSTKASNTIAPSTEWWTMVCNLALRMMRRQWSLWVLPTIC

SEQ ID NO: 6219 - protein, 63 aa, Homo sapiens
MMKTEQFQVLQLLWCHIVLMDLLKQFIRRRLLVSLDSGLGHLKICHKQVLVTLILASLLLKEV

SEQ ID NO: 6220 - protein, 61 aa, Homo sapiens
LGLPANLRFVLIILWNFSVPGKQVFMILKGSHLALLNRYLVVHLCCRNSRRKDKISVMLVL

SEQ ID NO: 6221 - skipped

SEQ ID NO: 6222 - protein, 59 aa, Homo sapiens
CYSSSKSCWYNTWPKSVRSAQLSLSCQCCASSYTGEKMVHGACGYCLPGWNFTFWFNLY

SEQ ID NO: 6223 - skipped

SEQ ID NO: 6224 - protein, 59 aa, Homo sapiens
IHGSLWVQSGPAGQDPLWLQGSATDQAVPDHPAHSAGVPPLRPALWHSVVPNIMDLEGF

SEQ ID NO: 6225 - protein, 59 aa, Homo sapiens
MQATLCARQETWPQDPTTCQFFIQEMGMLVLVMFPDTSTLCPKCFIIFLRISAYMVEAS

SEQ ID NO: 6226 - protein, 58 aa, Homo sapiens
FLNPFRRVGLGHLHWSHRQLPGPPLWGLALFLVLHPGLGGSAHDVLRRDFLHVRLPGA

SEQ ID NO: 6227 - protein, 58 aa, Homo sapiens
PSRLRPAAGTRGAGAAAGGLGRAAPGAAAQEAFRFQDPGKGCCFVYQSRRGSWHPPGS

SEQ ID NO: 6228 - protein, 58 aa, Homo sapiens
PSSYWDSCWCQYLRRFGGSPRCHPQRNHAGHFHHHCCLLRGCNLCRGLCGPRCHREHE

SEQ ID NO: 6229 - protein, 58 aa, Homo sapiens
SGKPFLSGYFLFFSDTAQAARKPRVQSQGYIFSRLYHPATLLPLFGKHRGHFTGYHGL

SEQ ID NO: 6230 - skipped

SEQ ID NO: 6231 - protein, 57 aa, Homo sapiens
CSFLPTLYSTDVLKLININFILGSISLAITGDQLIRFDPSFSLMLTPTVFLLVLTFL

SEQ ID NO: 6232 - protein, 57 aa, Homo sapiens
SKSWVYPSIRFSWNSNFLFRYWVNNVWLCNADEGNGTTCRRFLLYRLPTVWCHCISN

SEQ ID NO: 6233 - protein, 56 aa, Homo sapiens
GDRRRAPQHESSDRCALHGPVQGHQSPVQLLQPQVPPACQPALLDLPGLSDDSPTQ

SEQ ID NO: 6234 - protein, 56 aa, Homo sapiens
SDTGALCFHCVLHIENPFHLWPEKDLFHMWLPPGCCHSLLRDHDLHVCVSQSPPVA

SEQ ID NO: 6235 - protein, 55 aa, Homo sapiens
HEGPESILGFQTDLSSLQGVTTVFHSSHFIGHTVTLLIGISPEEDSREEAHLRKA

SEQ ID NO: 6236 - protein, 55 aa, Homo sapiens
PDSDQPGPLYPLDPSCLISSASNPQELSDCHYIHLAFGFSNWRSCPVLPGHCGVQ

SEQ ID NO: 6237 - skipped

SEQ ID NO: 6238 - protein, 54 aa, Homo sapiens
GKLFRRSKFEAKPTSGPWQPGRNITTKLIQRPLRSSLGSRKTPPSLPFLGEEEL

SEQ ID NO: 6239 - protein, 54 aa, Homo sapiens
QNSSFSGNWWETQDPKREIMSLQGLKLKKTLPPLHTESDPLAKGGHLLMKATDP

SEQ ID NO: 6240 - protein, 53 aa, Homo sapiens
KLLGNFLCLSTNFLCLDHILFPLKSTFHILCKTSLFLHHKDRESLSSCQSMMH

SEQ ID NO: 6241 - protein, 53 aa, Homo sapiens
TLESALEKGFMNLANVGKPAAVSAPLFSCKESTLEKGLMSAVNVGNLLAKPLI

SEQ ID NO: 6242 - protein, 52 aa, Homo sapiens
GVRAVLWLRGEFLLQMQSTVQSFLQWTIAYLSQRRWKDRFWGLTFVSRATTW

SEQ ID NO: 6243 - protein, 52 aa, Homo sapiens
KIMFGICIREFWSQKNKYLLCIIGTGKNTARVQTIWTAYIGISTPSLLKRIN

SEQ ID NO: 6244 - skipped

SEQ ID NO: 6245 - protein, 51 aa, Homo sapiens
TMVPYELQEILGTSPPCSAMILWTLVSLREHMLESQGTHLVGIALPEVMMA

SEQ ID NO: 6246 - protein, 51 aa, Homo sapiens
VTLLYVNTVTLAPNVNMESSRNAHSPATPSAKRKDPDLTWGGFVFFFCQFH

SEQ ID NO: 6247 - protein, 51 aa, Homo sapiens
WPFIQSLCWATFLLSQLPVWISHFKHPCTSFFKICHFLKYVSPWLWCQKCL

SEQ ID NO: 6248 - protein, 50 aa, Homo sapiens
HLHVEHHWESNHHHSHPTGFASQDTHVFLPPKFLIFRSLIHNCLHSQISC

SEQ ID NO: 6249-6250 - skipped (2 entries)

SEQ ID NO: 6251 - protein, 50 aa, Homo sapiens
NHSAGLTLYKRRFHHHLILMWLDQMISETLTQHLQKKQFHILCVYLLTIL

SEQ ID NO: 6252 - skipped

SEQ ID NO: 6253 - protein, 49 aa, Homo sapiens
IMPFRWIPACLSLIPSLPRDLRLPGISGLSTLPRSPWTLREQKTSKAIP

SEQ ID NO: 6254 - protein, 49 aa, Homo sapiens
PTPFCTTLRNFFLSSLILAVLCTNCIFRYTASFLQAFMLPGFLKHTKRK

SEQ ID NO: 6255 - protein, 49 aa, Homo sapiens
SASRQTTSGLPFHYPWRQTKGRWRLSTPSCSSYAESSPFLKEFSNFANS

SEQ ID NO: 6256 - protein, 48 aa, Homo sapiens
DNTRFPYVCLSLCPVSCPCVKVAVSDDVSSYRLYCVSADFKYIDGNNN

SEQ ID NO: 6257 - protein, 48 aa, Homo sapiens
RMDPGHMAASLLPIPPVKMQCVVGLFQILLKETLLLLAMTESGITQET

SEQ ID NO: 6258 - skipped

SEQ ID NO: 6259 - protein, 47 aa, Homo sapiens
CPRYAKVIRERVGSRFVTSSHRVQDSTSVTTSPEGTVVFPTASGPIT

SEQ ID NO: 6260 - protein, 47 aa, Homo sapiens
LLYRGCVAHWWPLPWANICQGCSGLLWHGLVGTNSEIQEWPLFITCR

SEQ ID NO: 6261 - protein, 47 aa, Homo sapiens
MVRESGHLEIVHMKTTDIMNTTMISSKECHRIRGGMLQVLGELLLHL

SEQ ID NO: 6262 - protein, 47 aa, Homo sapiens
PSFTWLLMLEVCFPQSSHPCSEFNNVEFTVNKLVTHWPLGFLLLSWL

SEQ ID NO: 6263 - protein, 47 aa, Homo sapiens
RRSSPCSSTCSMPRTEPPAPEMIPSSALRSAPWARLCHKPRSLSHYC

SEQ ID NO: 6264 - protein, 46 aa, Homo sapiens
LLYVHPLHHLANELGHRKTQGIFYMLSSPDCGDHILWYHLLYVCKT

SEQ ID NO: 6265 - protein, 46 aa, Homo sapiens
LMIRVCILICMPEHTSTLKTKRTLFCSGIALMVMYSLTIKVRNIPL

SEQ ID NO: 6266 - skipped

SEQ ID NO: 6267 - protein, 45 aa, Homo sapiens
RRHQPNDCRDSYEPSFNPFPLHFHHSFVKQGTRICNCTTCQTPSG

SEQ ID NO: 6268 - protein, 45 aa, Homo sapiens
YLVYFSPGSGHGCTLPRSKQLSRLLRLSGKTNVPGVWMRRLPQVH

SEQ ID NO: 6269 - skipped

SEQ ID NO: 6270 - protein, 44 aa, Homo sapiens
KSYFGPFELLGSILDCWNYRLHSEILFHGLKMPYFIGAFFHHAF

SEQ ID NO: 6271 - protein, 44 aa, Homo sapiens
LYNSFGFNAKRSKCSIFQRGIKDGKEHEKQKQDVGFNARSCKQY

SEQ ID NO: 6272 - skipped

SEQ ID NO: 6273 - protein, 44 aa, Homo sapiens
PPCFLPYLLKLRSSIGSATHPMQVFHTPTVIKCNTQFQLMLTPV

SEQ ID NO: 6274 - protein, 44 aa, Homo sapiens
PSHRARASRARQLPRRSGLRGPARGTSGAPSRAVLGGCSTRPGQ

SEQ ID NO: 6275 - protein, 44 aa, Homo sapiens
QEVAWVLKPLLPIQVCWSWQCAQKENMQRLCFLTTVSVIPSGTT

SEQ ID NO: 6276 - skipped

SEQ ID NO: 6277 - protein, 44 aa, Homo sapiens
VMPLHHGLTQKMISETCSVRSFMDLKIKLAMKIGGVSLTSFLFP

SEQ ID NO: 6278 - protein, 44 aa, Homo sapiens
WSGLNIVSARLNISRKSTQMPCTSRRGPPPAPWGSAAPAGQGLN

SEQ ID NO: 6279 - protein, 43 aa, Homo sapiens
LYDYSVTCIYCSVFCILRLFSPEPGATGSASGGWLEQYGKCSK

SEQ ID NO: 6280 - protein, 43 aa, Homo sapiens
PHYLVVDLGWTVTPFGMSYTRPVLHAWLLAVSSSWLPKWPQES

SEQ ID NO: 6281 - skipped

SEQ ID NO: 6282 - protein, 42 aa, Homo sapiens
ANMDAQPMMPTPNIIAELPRCTGRRSGSWGVRPWLGMALIFG

SEQ ID NO: 6283 - protein, 42 aa, Homo sapiens
AWLESDLYYAEAFGNESTFWKPSVSDSTPAFSDSSRGTAQSV

SEQ ID NO: 6284 - protein, 42 aa, Homo sapiens
CVWPHWGLKPIRNTAMFQYYLQNRLIYILRWKKSQIRKNSLL

SEQ ID NO: 6285 - protein, 42 aa, Homo sapiens
FCVPGNYFLPGAHCRSSSICFQRLDQRPAVFLYKQQHQSISG

SEQ ID NO: 6286 - skipped

SEQ ID NO: 6287 - protein, 42 aa, Homo sapiens
KGAGATVELLFMSSTPNQAQSSILTGLTPIDPRKRVNVWSSI

SEQ ID NO: 6288 - skipped

SEQ ID NO: 6289 - protein, 42 aa, Homo sapiens
PQPFSSCWPWPSTLESPSASWAAALGTGAFPGPTSWAGWQCS

SEQ ID NO: 6290 - protein, 41 aa, Homo sapiens
CLRLHMQMDWYMTQSWGAKPTMACSRWQDLGDSILYIQHLT

SEQ ID NO: 6291 - protein, 41 aa, Homo sapiens
EQRNTLKKMNTASFSVSMQEVQMPLLVESIPITILMFLMNT

SEQ ID NO: 6292 - protein, 41 aa, Homo sapiens
FGESRGPLGQPLGGPQLSEQRSGPLPKQQHRPELLGDLWKC

SEQ ID NO: 6293 - protein, 41 aa, Homo sapiens
FSEGTMNVPASTEFMDFMMNVKEDTTLNYGKLSQTVLTVYR

SEQ ID NO: 6294 - protein, 41 aa, Homo sapiens
FTSVRLKIGVLIYLGEQKIPTKKLIIIHWRKFVQILIFSTV

SEQ ID NO: 6295 - protein, 41 aa, Homo sapiens
HGDVYCICPVWCSVAGMVCLLLERSPENSVLDWCCHLPGNA

SEQ ID NO: 6296 - protein, 41 aa, Homo sapiens
LTWPSLTSLWFQSLGRMKVVNVNLDFFRNGTSLPSHHSWNS

SEQ ID NO: 6297 - protein, 41 aa, Homo sapiens
RFCVLFYYYGGNCGLFYLLFCSKATECKSSKQEAEAIKGRC

SEQ ID NO: 6298 - protein, 41 aa, Homo sapiens
TLGGSVTQKLKMTATGVPVIPPLVISWWAGTRSLWLLLPVG

SEQ ID NO: 6299 - protein, 40 aa, Homo sapiens
KLPVFNATAVRRRHYYTVALLGGGLTASRGGLGHKCRQIH

SEQ ID NO: 6300 - protein, 40 aa, Homo sapiens
QPSLPSSPNPDPFLGLPSLLPAPELLHDEELRDHSAAHVL

SEQ ID NO: 6301 - protein, 40 aa, Homo sapiens
QTQPGGSKDFKQLNMNFMNWVCSRITLWRGGISRITVMEV

SEQ ID NO: 6302 - protein, 40 aa, Homo sapiens
WPDEQWEEHRDQCHALGQSSALWDWPHHQLLPAGRGHRWP

SEQ ID NO: 6303 - protein, 39 aa, Homo sapiens
AILVRKSVTFALIPGIGVAYQIQMKKEKRNQRWMADLGS

SEQ ID NO: 6304 - protein, 39 aa, Homo sapiens
FQGYSVCETRKELFRSKSYLSSSYYLPQDFGCQLSNSSV

SEQ ID NO: 6305 - protein, 39 aa, Homo sapiens
ILWYNDGHVFPPSDQLQPQRCSDNCDVCGSDPSIKSFHL

SEQ ID NO: 6306 - protein, 39 aa, Homo sapiens
LTAKFKMGLKVFVSSTPEKADQVARLLLNLNQKMKSNWP

SEQ ID NO: 6307 - protein, 39 aa, Homo sapiens
LVKYCTRSHHQVKSYTPSGIQSVHESCESYSYLGAIAWH

SEQ ID NO: 6308 - protein, 39 aa, Homo sapiens
PVWPLIMLLQIIPSQQVLLMGLWSVALVLVKDSSLLPPA

SEQ ID NO: 6309 - skipped

SEQ ID NO: 6310 - protein, 38 aa, Homo sapiens
CLDRAGHPAVRREPASSLICRVPNSQLGMSASRLPSRT

SEQ ID NO: 6311 - skipped

SEQ ID NO: 6312 - protein, 38 aa, Homo sapiens
KICVKALKLVTPVRSWWDILPCIESVLEWLVSSLSSVY

SEQ ID NO: 6313 - protein, 38 aa, Homo sapiens
LFIILPWAHCMWNFMCVFGHCPLGNQTAATEKEKISVN

SEQ ID NO: 6314 - protein, 38 aa, Homo sapiens
PGHLYSHFVGQLSYCHSYQCGSRTSNTHVLLSSKSVTS

SEQ ID NO: 6315 - protein, 38 aa, Homo sapiens
QHCPSISTGRVQPWESHLEKSLIPLSMNQTCRPCLGRQ

SEQ ID NO: 6316 - protein, 38 aa, Homo sapiens
QKLTWRNINFCLNTQVFSLMSRRGNTSSTNLKYVRRMI

SEQ ID NO: 6317 - protein, 38 aa, Homo sapiens
QQLLGFLLVPISQEIWRIPKMPSPEEPCWPFSSPLLPT

SEQ ID NO: 6318 - protein, 38 aa, Homo sapiens
SGWCICSPYWLAFDRHDLRNLWIFSLVQGLLSCRCWLY

SEQ ID NO: 6319 - protein, 38 aa, Homo sapiens
VPCSVLVKLISIQKMRKIMINMEFELESNFEVVLNCMN

SEQ ID NO: 6320 - protein, 37 aa, Homo sapiens
AHLLVYILWAVDGRKKKNKWNAMVVLNKSLNRVHLLG

SEQ ID NO: 6321 - protein, 37 aa, Homo sapiens
PPLYSWLHMLKTKELMSTRQLFCYLLWLSLICLLGLL

SEQ ID NO: 6322 - protein, 37 aa, Homo sapiens
SDSIFACSRRRLWVSLSWSDNSSSETDSKHSHYDGHL

SEQ ID NO: 6323 - protein, 37 aa, Homo sapiens
SHPKVFTGFHSFSIFCFYYFSLPYILLLEERQKKLQI

SEQ ID NO: 6324 - skipped

SEQ ID NO: 6325 - protein, 37 aa, Homo sapiens
TPYMGGGHSWSSSGFCNCPYLLLLYNVDCYLHECHCH

SEQ ID NO: 6326 - protein, 36 aa, Homo sapiens
ANQEISIVKTIVVCLKVGCVILKMTVVMAAMKKIAQ

SEQ ID NO: 6327 - protein, 36 aa, Homo sapiens
CIVTPMFFHMHSAFTRMSLNSPVLIPPSTDCTQLCL

SEQ ID NO: 6328 - protein, 36 aa, Homo sapiens
FLCPFLLLRRQLWAILSFILLEGYGMQELKAGSRGN

SEQ ID NO: 6329 - protein, 36 aa, Homo sapiens
FQVPHGVWDRGSGEEPAGKPEDEQHRAAQAGPAAFR

SEQ ID NO: 6330 - protein, 36 aa, Homo sapiens
FTDTHHTDSKPLALQYPLLEYSQSCCSPKSSQTARC

SEQ ID NO: 6331 - protein, 36 aa, Homo sapiens
KETLSCGRFTVSSLHTAGPKSRIHFSWLGSSNAVCS

SEQ ID NO: 6332 - protein, 36 aa, Homo sapiens
LHCYCPGKPLDSGNSASPCSPAPISYVLFFRSSLFH

SEQ ID NO: 6333 - protein, 36 aa, Homo sapiens
LPSSLTSSKISSTCYFIMTGLKSLQTTKPMSSVKIK

SEQ ID NO: 6334 - protein, 36 aa, Homo sapiens
QIMKFQTSRRKKLHESRSGLCMKLGDPMWNPAGKAA

SEQ ID NO: 6335 - protein, 36 aa, Homo sapiens
QSEYCCSKTNSTKKPGNINKRIPCIIWISTSEKRSG

SEQ ID NO: 6336 - protein, 36 aa, Homo sapiens
RSHFSWAMVGWRLSFFSLASLWPMCLRGCWPQSLCA

SEQ ID NO: 6337 - skipped

SEQ ID NO: 6338 - protein, 36 aa, Homo sapiens
TSLQCLVLESETKEQESQETGESNSSRGKSEKLVCL

SEQ ID NO: 6339 - protein, 36 aa, Homo sapiens
VKSWLFSNLPVQIPTSMRTWSWPEQFLGWWDPCPQL

SEQ ID NO: 6340 - protein, 35 aa, Homo sapiens
CSSISWSCSSWPGFLRPLCGMKLASLPPSWWIRWR

SEQ ID NO: 6341 - protein, 35 aa, Homo sapiens
FGMVHPCHHIILGIRDPSHLSRLFQHEYLLEPVEA

SEQ ID NO: 6342 - protein, 35 aa, Homo sapiens
HRFQAFWLICWRNPCCGGVFIFSSNMAVVHCSRGF

SEQ ID NO: 6343 - protein, 35 aa, Homo sapiens
IREGTAPDYSLRVALHSEPADNSRGCGGSFPCPCH

SEQ ID NO: 6344 - protein, 35 aa, Homo sapiens
ISLTTRGTMRRLLPSTWTGSWTSAGSLPWPAGWST

SEQ ID NO: 6345 - protein, 35 aa, Homo sapiens
LYVYFISVFSDSLYICIRYHPRHSSFTANRIPKCP

SEQ ID NO: 6346 - protein, 35 aa, Homo sapiens
PRKPSRQRGSSDESWQTAATSRHVSPSNEESETGF

SEQ ID NO: 6347 - protein, 35 aa, Homo sapiens
SGKMKSCQELDLLPEKLITEDVSLPCPERSVWKGT

SEQ ID NO: 6348 - protein, 35 aa, Homo sapiens
SIKHSIWSSSSALGLSLYLQTRVLHKNKGRRKSGI

SEQ ID NO: 6349 - protein, 35 aa, Homo sapiens
SMKKLITCGMEALRPKQEKNSNTCFRSLHCAGLSL

SEQ ID NO: 6350 - protein, 34 aa, Homo sapiens
FKLYSPLCYYVFVSGRAYGWRPNIQIWSAGTGTK

SEQ ID NO: 6351 - protein, 34 aa, Homo sapiens
GLALTCLSVCSTQTSVLLFFIKKSSLPLASWFLM

SEQ ID NO: 6352 - protein, 34 aa, Homo sapiens
IHYSSLGSLYVELYVCVWSLSFGESDCCYRERKN

SEQ ID NO: 6353 - protein, 34 aa, Homo sapiens
ISMEVKFKDARVVQFEQTAWIVLIEQIVCRHFLA

SEQ ID NO: 6354 - protein, 34 aa, Homo sapiens
KSRRSFNWEVPTDISKEETYRAHGRSFCTSCSIP

SEQ ID NO: 6355 - protein, 34 aa, Homo sapiens
RIQMKKWPKSTGRRGTSVGASLGTIMQSVQTPAP

SEQ ID NO: 6356 - protein, 34 aa, Homo sapiens
RMDSKPWKASNLPLKRCLRIFTRSNRPRMKKEGS

SEQ ID NO: 6357 - protein, 34 aa, Homo sapiens
VESVVILMKTMEMGRTFNQSFKKFRKLKNLRQKK

SEQ ID NO: 6358 - protein, 34 aa, Homo sapiens
VTLLYVNTVTLAPNVNMESSRNAHSPATPSAKRK

SEQ ID NO: 6359 - protein, 33 aa, Homo sapiens
ASLLVFILPALNLVRVSSLKKKKYQVSLALNGT

SEQ ID NO: 6360 - protein, 33 aa, Homo sapiens
CICLNKKDSQGGYSIYYNQETIKSSNEAYRSDS

SEQ ID NO: 6361 - protein, 33 aa, Homo sapiens
FICHANISQGRVPEQLPIKVQSRRNTYRYKGAE

SEQ ID NO: 6362 - protein, 33 aa, Homo sapiens
GCGDSKSDGRTSCSSCQSSKIFLCWDRGVPCGL

SEQ ID NO: 6363 - protein, 33 aa, Homo sapiens
GLVYFVCMKELTLERNRMNVSSVVKPSLFTVPI

SEQ ID NO: 6364 - protein, 33 aa, Homo sapiens
GPVYYICMKERTLERNHMNVSSVLKPFLFTVPI

SEQ ID NO: 6365 - skipped

SEQ ID NO: 6366 - protein, 33 aa, Homo sapiens
GPVYYVCMKELTLERNHMNVSSVLKPSLFTVPI

SEQ ID NO: 6367 - protein, 33 aa, Homo sapiens
LPQTHTGIHQLGVYTPTLGSPPAICLLIWALTT

SEQ ID NO: 6368 - protein, 33 aa, Homo sapiens
LVELQKAIKCTIPWWNIALRLHQEKMFETLPRY

SEQ ID NO: 6369 - protein, 33 aa, Homo sapiens
LWRLAEQKSNFLLLYWDDCGNCGLSANHHFYTI

SEQ ID NO: 6370 - skipped

SEQ ID NO: 6371 - protein, 33 aa, Homo sapiens
NKPMYIDFWDGKPTYVLLKQGYVISIFGHFCAW

SEQ ID NO: 6372 - protein, 33 aa, Homo sapiens
PNMQIHLSLLFMIALLQLEKMPPMWLSVLSGRS

SEQ ID NO: 6373 - protein, 33 aa, Homo sapiens
PPCFLPYLLKLRSSIGSATHPMQVFHTPTVGEI

SEQ ID NO: 6374 - protein, 33 aa, Homo sapiens
TCGDLEESANKPANLLKSSKKMLLHVHWSLLEI

SEQ ID NO: 6375 - protein, 33 aa, Homo sapiens
TLKLGAPGLPSESFCPATASHTPQPPRTRATAW

SEQ ID NO: 6376 - protein, 33 aa, Homo sapiens
VKVQTHISVIPSLESSPLGVQDWGNPSALIQNS

SEQ ID NO: 6377 - protein, 33 aa, Homo sapiens
YRCICLPAKRPARSRLVPLGSLGVFTCSWTGPR

SEQ ID NO: 6378 - protein, 32 aa, Homo sapiens
AADCDSFFVCFDFPVYCRASYVSTTMFWSQRN

SEQ ID NO: 6379 - protein, 32 aa, Homo sapiens
CRSMQKVLVENDCGRFRKCTMLRHIQSLSIYL

SEQ ID NO: 6380 - protein, 32 aa, Homo sapiens
FFVTGCDACSESREGHVQVLRSPPQPEFRAVF

SEQ ID NO: 6381 - protein, 32 aa, Homo sapiens
IAFHFHETKCGVYIQRNWGPHDQRQQSEDEVL

SEQ ID NO: 6382 - protein, 32 aa, Homo sapiens
IGPRLNKLLLTVNTRIYGDRQSAMSSFFIGFL

SEQ ID NO: 6383 - protein, 32 aa, Homo sapiens
IVQRMCCALVAATMGQHLPRLLRITVAWLGRY

SEQ ID NO: 6384 - protein, 32 aa, Homo sapiens
LAAPRPRHAPSFSVAAPSSLWRRQSGPCMMPS

SEQ ID NO: 6385 - protein, 32 aa, Homo sapiens
LRLLNIMGVPILFWCTFQAEWPSSFRMWICRI

SEQ ID NO: 6386 - protein, 32 aa, Homo sapiens
LVVSCWLRYLTYRLCTVSASLLATQLKGTVED

SEQ ID NO: 6387 - protein, 32 aa, Homo sapiens
RLFLPRWKSGMKGRLKKHEAKPIRKPSKIRLH

SEQ ID NO: 6388 - protein, 32 aa, Homo sapiens
SPKFIFLRNLIYSYLCSKILIQYLNWEQNNNV

SEQ ID NO: 6389 - protein, 32 aa, Homo sapiens
SRDRVSSCCSCWSRTPDLKRSAHLRLPKCGII

SEQ ID NO: 6390 - protein, 32 aa, Homo sapiens
THWCLTPCRRHFSLIRARLELVANTKLRSQIA

SEQ ID NO: 6391 - protein, 32 aa, Homo sapiens
TMTFRASRVRTRPGSLLPSPPLSYTAWCFSSA

SEQ ID NO: 6392 - protein, 32 aa, Homo sapiens
WRQLWGSSQVKVALRVGGKFALYLKALAMQHR

SEQ ID NO: 6393 - protein, 31 aa, Homo sapiens
AESALWDQEVEEDLGRALPGQSPRRSAARVL

SEQ ID NO: 6394 - skipped

SEQ ID NO: 6395 - protein, 31 aa, Homo sapiens
GSVCMEKAPLRICVTLWSRLVLALSCCCLCS

SEQ ID NO: 6396 - protein, 31 aa, Homo sapiens
HLNKWELDTLSFKHVNFFQKGRRLGDKIRAT

SEQ ID NO: 6397 - protein, 31 aa, Homo sapiens
LQRKISILQRVKAKFLNELHHLRNQNASKMR

SEQ ID NO: 6398 - protein, 31 aa, Homo sapiens
LYPLSQLQYAEDLLLRRKVQQMHYLSAHQVV

SEQ ID NO: 6399 - protein, 31 aa, Homo sapiens
PVAKRSSICTECFAGYVLVFLSLHSMVDSSK

SEQ ID NO: 6400 - protein, 31 aa, Homo sapiens
SSSLQWLETRQKVGNSLPIIILGACYIISSI

SEQ ID NO: 6401 - protein, 31 aa, Homo sapiens
STCWLLFSFSTSTFIKQCGGILTIILLLVHH

SEQ ID NO: 6402 - protein, 31 aa, Homo sapiens
TCSFKEHFSLRNCIPAPVPVLSSTMLPVQYF

SEQ ID NO: 6403 - protein, 31 aa, Homo sapiens
TYKENGPFLSTELGFTLLKLLVHWVTYIPSK

SEQ ID NO: 6404 - skipped

SEQ ID NO: 6405 - protein, 30 aa, Homo sapiens
CLFVLFYFCRDLFLPLEQDAFFSPSALGHL

SEQ ID NO: 6406 - protein, 30 aa, Homo sapiens
DFIGYSSSGEAASTNYCTGNLLFLLFFIQQ

SEQ ID NO: 6407 - protein, 30 aa, Homo sapiens
DQVSQRKYQNWSFILTKLTVSSFPTLVTGL

SEQ ID NO: 6408 - protein, 30 aa, Homo sapiens
GKKEILWPLPIAPGWFSFFMPFKMIGICTW

SEQ ID NO: 6409 - skipped

SEQ ID NO: 6410 - protein, 30 aa, Homo sapiens
IIKMSYLKDIWSILYQEVVIFQGIQTMNIN

SEQ ID NO: 6411 - protein, 30 aa, Homo sapiens
NQARLWTCWNARICSSHRHVSSSEKLYPES

SEQ ID NO: 6412 - skipped

SEQ ID NO: 6413 - protein, 30 aa, Homo sapiens
SMSTLRCRPPTLRMKRLPVAVCSCTPPEST

SEQ ID NO: 6414 - skipped

SEQ ID NO: 6415 - protein, 30 aa, Homo sapiens
VPMSLACSITVSFVGQISTLVLDVSSISHW

SEQ ID NO: 6416 - protein, 29 aa, Homo sapiens
CCGHSLRGQEARAAGLPLHTPELGSAVQS

SEQ ID NO: 6417 - protein, 29 aa, Homo sapiens
CVSSWEGKTMQFFPVGRKWARNKNYSWML

SEQ ID NO: 6418 - skipped

SEQ ID NO: 6419 - protein, 29 aa, Homo sapiens
LAYLHIITSESTMKRPQTSSPTGMKRIIL

SEQ ID NO: 6420 - protein, 29 aa, Homo sapiens
LDSYSFQSCCLFHCPCKQLRYHFHITCIL

SEQ ID NO: 6421 - protein, 29 aa, Homo sapiens
LHSGDLQPYPTPPPRAVPSLPRLCCLLGA

SEQ ID NO: 6422 - protein, 29 aa, Homo sapiens
LSNRDLHHPVGWHPWPGGQRLDCSPVYTG

SEQ ID NO: 6423 - protein, 29 aa, Homo sapiens
LWPQCIFSSPYFCNCIPGPFSGFHSEVPG

SEQ ID NO: 6424 - protein, 29 aa, Homo sapiens
LYFLELPSFTSWPPCLMIVMWPSANPCIT

SEQ ID NO: 6425 - protein, 29 aa, Homo sapiens
NATHRLYCNGIIKIFDDVSDILQSLYSSS

SEQ ID NO: 6426 - protein, 29 aa, Homo sapiens
RGKQRAPWTAPRRATVIRTAVWTTSKTAT

SEQ ID NO: 6427 - protein, 29 aa, Homo sapiens
RLLLPTHLNQNVQVQVLLFSWMKRDIKKA

SEQ ID NO: 6428 - protein, 29 aa, Homo sapiens
SAGSSGRNSLESSGTSPKICIGKSRTTDE

SEQ ID NO: 6429 - skipped

SEQ ID NO: 6430 - protein, 29 aa, Homo sapiens
YWLPQGQDMHLHSPWRRRAVYGGDRAVPA

SEQ ID NO: 6431 - protein, 28 aa, Homo sapiens
FWIELTFFRIQCYPPFGTWDWSYLGLIL

SEQ ID NO: 6432 - protein, 28 aa, Homo sapiens
GLHSFADINARFCKLWSSAFCWKTGQVQ

SEQ ID NO: 6433 - protein, 28 aa, Homo sapiens
LENYSGGASSRQNQHLDLGSQAGTSLPN

SEQ ID NO: 6434-6435 - skipped (2 entries)

SEQ ID NO: 6436 - protein, 28 aa, Homo sapiens
LSSFRVSRLGKLARSSPEDCGQWLLKQC

SEQ ID NO: 6437 - protein, 28 aa, Homo sapiens
LVCVLSYGCVASFCFRCRALSRASSSGQ

SEQ ID NO: 6438-6439 - skipped (2 entries)

SEQ ID NO: 6440 - protein, 28 aa, Homo sapiens
QFRFLCFWFITLLKMLWFPSNLFQTYIF

SEQ ID NO: 6441 - protein, 28 aa, Homo sapiens
SAIDTVFFITFLHSSVNYLFSFYVASYF

SEQ ID NO: 6442 - protein, 28 aa, Homo sapiens
SMIMYSLPLTYSNLHTLTILKKYMLSQN

SEQ ID NO: 6443 - protein, 28 aa, Homo sapiens
VIMSITGKKEESNRSKALSEATPFHWIT

SEQ ID NO: 6444 - protein, 28 aa, Homo sapiens
WPDQACHWRPILLTLGCGDHPSEWDCGN

SEQ ID NO: 6445 - protein, 27 aa, Homo sapiens
ATRHLDSSGSPSHLAGAYTKITSFGRL

SEQ ID NO: 6446 - protein, 27 aa, Homo sapiens
CLSFFKLTLEKMKKFLGSKGGRSTTEG

SEQ ID NO: 6447 - skipped

SEQ ID NO: 6448 - protein, 27 aa, Homo sapiens
CVALRVSVDAEENNRQITKRRCFITSI

SEQ ID NO: 6449 - protein, 27 aa, Homo sapiens
CVVFHVFGLEQCLVCDLAQYLVLCEDY

SEQ ID NO: 6450 - protein, 27 aa, Homo sapiens
FYWEIDIRTTRRKGKAACWPGYIGFLC

SEQ ID NO: 6451 - protein, 27 aa, Homo sapiens
HGFIMVYIINDRNTKAEIPGTQSIYTL

SEQ ID NO: 6452 - protein, 27 aa, Homo sapiens
HIQDMNLLVYVAKSFLGISRWLCSFGR

SEQ ID NO: 6453 - protein, 27 aa, Homo sapiens
ICCGAGEGITLHQFEAKSSGEKGFSSI

SEQ ID NO: 6454 - skipped

SEQ ID NO: 6455 - protein, 27 aa, Homo sapiens
LFCTFGSQFYQPEAILNQSIDLKDAKK

SEQ ID NO: 6456 - protein, 27 aa, Homo sapiens
LKRLFVKMTRKSQQERPVPRRSSDQDS

SEQ ID NO: 6457 - protein, 27 aa, Homo sapiens
LLFCGDIYVLLCALANVCFWNIAIWNN

SEQ ID NO: 6458 - protein, 27 aa, Homo sapiens
LLLCPLLGKRRNPTGQRPFQKQLHFIG

SEQ ID NO: 6459 - protein, 27 aa, Homo sapiens
PSCTYILHSSPKRSLLGAVNMAGMGTM

SEQ ID NO: 6460-6461 - skipped (2 entries)

SEQ ID NO: 6462 - protein, 27 aa, Homo sapiens
SGFLGEKFSGVIWNFSENMYWQVKNNR

SEQ ID NO: 6463 - protein, 27 aa, Homo sapiens
SGSFRSFDEGIVHSKRPSGMDLFNVVQ

SEQ ID NO: 6464 - protein, 27 aa, Homo sapiens
SYFRSAHLHYRNCYGRSWILAPKRTFY

SEQ ID NO: 6465 - protein, 27 aa, Homo sapiens
TMILQTLAWWRQEQNVEREWCATMVNV

SEQ ID NO: 6466 - protein, 27 aa, Homo sapiens
TPFCTLSAKHVPLSISGSPALELLGPW

SEQ ID NO: 6467 - protein, 27 aa, Homo sapiens
TVVIFSTSGFLQPTLIFLKLSWKSTHL

SEQ ID NO: 6468 - protein, 27 aa, Homo sapiens
YVSWELQLQSRQMQDYYLIIPNQLLKR

SEQ ID NO: 6469 - protein, 26 aa, Homo sapiens
ALHGWWAQLEFFRLLQLSLSAAAVQC

SEQ ID NO: 6470 - protein, 26 aa, Homo sapiens
ARSSLSLEANSPYLGVWRPPLRMGLW

SEQ ID NO: 6471 - skipped

SEQ ID NO: 6472 - protein, 26 aa, Homo sapiens
FKDRDNYNREAVTAYLIHIINVTGIG

SEQ ID NO: 6473 - skipped

SEQ ID NO: 6474 - protein, 26 aa, Homo sapiens
KILILMKMKGDCLEVKNLSQVKVPEI

SEQ ID NO: 6475 - protein, 26 aa, Homo sapiens
LARPKCTSQGVEVCDFGVSAWRPKSH

SEQ ID NO: 6476 - protein, 26 aa, Homo sapiens
LLRNVLHDQCTMDCGHFLLWRHGGEL

SEQ ID NO: 6477 - protein, 26 aa, Homo sapiens
LPTSLCISYGQWMEEKKRTNGTRWLF

SEQ ID NO: 6478 - protein, 26 aa, Homo sapiens
MNFKEQIVKSSLPKPWKKHPVPHPKV

SEQ ID NO: 6479 - protein, 26 aa, Homo sapiens
PSKKIDFLYLSRYAIRLRNLADDYHL

SEQ ID NO: 6480 - protein, 26 aa, Homo sapiens
PVYHSQSEEVLFPLLLAYIASSAYFT

SEQ ID NO: 6481 - protein, 26 aa, Homo sapiens
QLDQTNFEERIQTAPGIVRHIPNPFC

SEQ ID NO: 6482 - protein, 26 aa, Homo sapiens
SCVFYLERFKKNITDCSKMSPVVLDV

SEQ ID NO: 6483 - protein, 26 aa, Homo sapiens
SEPLCAGLLYTSLDSSNADLPAGTFG

SEQ ID NO: 6484 - protein, 26 aa, Homo sapiens
TYWFFFLFFFSFFYFLWILWLITQQV

SEQ ID NO: 6485 - protein, 26 aa, Homo sapiens
VIPVIVVLKIKKSMTNTCLNIQNALN

SEQ ID NO: 6486 - protein, 26 aa, Homo sapiens
VSVPHSGRVLSAQLMLTNVRFTQEHP

SEQ ID NO: 6487 - protein, 25 aa, Homo sapiens
ECLKKQFFIVNTKTSATLDCQPKAY

SEQ ID NO: 6488 - protein, 25 aa, Homo sapiens
FLWHCCRSWMWFIIHCNSDHYVPVF

SEQ ID NO: 6489 - protein, 25 aa, Homo sapiens
FSVKCMAECFSWCYSTKYSLQNQCC

SEQ ID NO: 6490 - protein, 25 aa, Homo sapiens
FWTHTPFRAAASSIAHANNSGITSI

SEQ ID NO: 6491 - protein, 25 aa, Homo sapiens
GEVLDRLGVGFMWEESKNLVQRFLD

SEQ ID NO: 6492 - protein, 25 aa, Homo sapiens
GEVLDRLGVGFTWEESKNLVQRFLD

SEQ ID NO: 6493 - protein, 25 aa, Homo sapiens
ISFGYPRWTLKALVYSQNGVLIWLM

SEQ ID NO: 6494 - protein, 25 aa, Homo sapiens
KISSVGLVLVHSITGTASLPVRNAK

SEQ ID NO: 6495 - protein, 25 aa, Homo sapiens
LHILSQSILLIQSQSLKKTYDWSGV

SEQ ID NO: 6496 - protein, 25 aa, Homo sapiens
MWTSHPRCPDGPQLEQRKGQVHIAM

SEQ ID NO: 6497 - protein, 25 aa, Homo sapiens
PSSSTPGSSLSRPAGTPPPGGWTSP

SEQ ID NO: 6498 - protein, 25 aa, Homo sapiens
QNRSATIRLSLRVMLSLEILFSGKM

SEQ ID NO: 6499 - protein, 25 aa, Homo sapiens
QQLQHPLPHLLQLSLLQLHLLQPHL

SEQ ID NO: 6500 - protein, 25 aa, Homo sapiens
RALSGTSRRTRRPSVSSARRLRHWN

SEQ ID NO: 6501 - protein, 25 aa, Homo sapiens
RRFFRGWEQLMTVSNKRVQLKHLPV

SEQ ID NO: 6502 - protein, 25 aa, Homo sapiens
SECLGRSPRTQPRPQDEDGIDTQPL

SEQ ID NO: 6503 - protein, 25 aa, Homo sapiens
SWKKLNMLLPLKNIAFLKQHWNRFL

SEQ ID NO: 6504 - protein, 25 aa, Homo sapiens
TQERATRPVYYGLWTFPSVETRWRT

SEQ ID NO: 6505 - protein, 25 aa, Homo sapiens
VVLRGHLCSIVRTGKRMFLEHCDLE

SEQ ID NO: 6506 - protein, 25 aa, Homo sapiens
YFLPSGFHVWESWRDPHQKTAVNGF

SEQ ID NO: 6507 - skipped

SEQ ID NO: 6508 - protein, 24 aa, Homo sapiens
ATPVANVSAGAPTSIATSLFTIPS

SEQ ID NO: 6509 - protein, 24 aa, Homo sapiens
CQLCQVWSLFVEHFLHCMRILCLC

SEQ ID NO: 6510 - protein, 24 aa, Homo sapiens
ILFLMKQQSAACFSATEMTLPGMS

SEQ ID NO: 6511 - protein, 24 aa, Homo sapiens
KKQLRNFPLCRHIISLLYAFFMPF

SEQ ID NO: 6512 - protein, 24 aa, Homo sapiens
LASFETSGYAYYSTGKRTVKQRCT

SEQ ID NO: 6513 - protein, 24 aa, Homo sapiens
LEISPLQISVSLLALSLKCWFTSW

SEQ ID NO: 6514 - protein, 24 aa, Homo sapiens
LTFIRNRYKRTCSSTILERLQAQY

SEQ ID NO: 6515 - protein, 24 aa, Homo sapiens
PASFIFSWVPPVTSLWAFLEYCAL

SEQ ID NO: 6516 - protein, 24 aa, Homo sapiens
PNCGYLQEISNSLHCSRAKFNNKC

SEQ ID NO: 6517 - protein, 24 aa, Homo sapiens
QSIWYLLQLKPMVKYPPHRFCRCF

SEQ ID NO: 6518 - skipped

SEQ ID NO: 6519 - protein, 24 aa, Homo sapiens
RVSALGPRGGGRPGPCSTRPVPTA

SEQ ID NO: 6520 - protein, 24 aa, Homo sapiens
RYGSKSSCVDVFSRKSYQCRLLHS

SEQ ID NO: 6521 - protein, 24 aa, Homo sapiens
YYGWQCMVGNSYHHMVFSSCAKVG

SEQ ID NO: 6522 - protein, 23 aa, Homo sapiens
CCVPYITSSRSFVFWSKRVCLGE

SEQ ID NO: 6523 - protein, 23 aa, Homo sapiens
FHVWRTDSGTQENRERKHNMDSV

SEQ ID NO: 6524 - protein, 23 aa, Homo sapiens
FPRHPQFAFTYFGDCYRRKQRCV

SEQ ID NO: 6525 - protein, 23 aa, Homo sapiens
HSFTWGKCLKPITLLWTTLLLHS

SEQ ID NO: 6526 - protein, 23 aa, Homo sapiens
KGRMETSSQLPKRLRSLNGPCRL

SEQ ID NO: 6527 - protein, 23 aa, Homo sapiens
LETELGSGICHRYFMPHDALLQL

SEQ ID NO: 6528 - protein, 23 aa, Homo sapiens
LETVNVKRKLISVCIILMMKLMK

SEQ ID NO: 6529 - protein, 23 aa, Homo sapiens
LFCTFGSQFYQPKRNILSMVAWT

SEQ ID NO: 6530 - protein, 23 aa, Homo sapiens
LICFRKFLLKKRKENKNLLKITV

SEQ ID NO: 6531 - protein, 23 aa, Homo sapiens
LLHFLEKSPLEEWNQWVMHLCWH

SEQ ID NO: 6532 - skipped

SEQ ID NO: 6533 - protein, 23 aa, Homo sapiens
LSLLPPPCTKCIKDGKTTAARSL

SEQ ID NO: 6534 - protein, 23 aa, Homo sapiens
LVDCFNKDGSVRPWRSRSLPQKK

SEQ ID NO: 6535 - protein, 23 aa, Homo sapiens
MLTCTTLSVRPCSVTVWCCRASR

SEQ ID NO: 6536 - protein, 23 aa, Homo sapiens
PFSGFLAHLLEESLLRGCFHFLV

SEQ ID NO: 6537 - protein, 23 aa, Homo sapiens
SAANVSKTLANPASTKKSTGIKK

SEQ ID NO: 6538 - protein, 23 aa, Homo sapiens
SQMLFASWHAGVSATLSWRPHSH

SEQ ID NO: 6539 - protein, 23 aa, Homo sapiens
SWFSVGPVWPCWSGSSVAPGVCH

SEQ ID NO: 6540 - protein, 23 aa, Homo sapiens
VWFSVFPAWSCWSGSSVDPGRCR

SEQ ID NO: 6541 - protein, 23 aa, Homo sapiens
VWFSVGPAWSCWSGFSVDPGRCR

SEQ ID NO: 6542 - protein, 22 aa, Homo sapiens
ASIVLQSAQDEYNRGSHIWRSL

SEQ ID NO: 6543 - protein, 22 aa, Homo sapiens
CFFCDFFIYFYIIHHVVSSCLC

SEQ ID NO: 6544 - protein, 22 aa, Homo sapiens
DLWQLLLFLRAVPPALLIHTKS

SEQ ID NO: 6545 - protein, 22 aa, Homo sapiens
FTCLEHIRVSNYINWHLTCNTY

SEQ ID NO: 6546 - skipped

SEQ ID NO: 6547 - protein, 22 aa, Homo sapiens
GCQQLPLRKCHFSSSQWLQSKC

SEQ ID NO: 6548 - protein, 22 aa, Homo sapiens
GTLRRTSNQLRSAGYQQRRQNK

SEQ ID NO: 6549 - protein, 22 aa, Homo sapiens
HLLSFFLFLISCLLAKLRLFFP

SEQ ID NO: 6550 - protein, 22 aa, Homo sapiens
HLLSFFPFLISCLLAKLRLFFP

SEQ ID NO: 6551 - protein, 22 aa, Homo sapiens
HQQIKMERQDQILQDRLWKLKK

SEQ ID NO: 6552 - protein, 22 aa, Homo sapiens
KKKMERSTSIKNQSSLASQKFP

SEQ ID NO: 6553 - protein, 22 aa, Homo sapiens
LGTLCGSKNSARQHWCMELHKP

SEQ ID NO: 6554 - protein, 22 aa, Homo sapiens
RDCPWEFVERKEDRQNKEGYRE

SEQ ID NO: 6555 - protein, 22 aa, Homo sapiens
SGSRFSWEVIPSEPESFVSLPV

SEQ ID NO: 6556 - protein, 22 aa, Homo sapiens
SLGSRELTSPTLSSSSCSWLFT

SEQ ID NO: 6557 - protein, 22 aa, Homo sapiens
YTLDQICLKKEVMIYQLLFYLQ

SEQ ID NO: 6558 - protein, 21 aa, Homo sapiens
CVLLGRKNNAIFSSGQKMGQE

SEQ ID NO: 6559 - protein, 21 aa, Homo sapiens
FLATLNQRIPDKETQAFLQKI

SEQ ID NO: 6560 - protein, 21 aa, Homo sapiens
FLIGNSQKSDCFCVFFYLPDN

SEQ ID NO: 6561 - protein, 21 aa, Homo sapiens
GEMLRRSSMSQERIILIHMLD

SEQ ID NO: 6562 - protein, 21 aa, Homo sapiens
GGGTQDSVWQACRKSQVPLLS

SEQ ID NO: 6563 - skipped

SEQ ID NO: 6564 - protein, 21 aa, Homo sapiens
HVALSLMMMISQKQGLMKMKI

SEQ ID NO: 6565 - protein, 21 aa, Homo sapiens
IPGKRTCVKNLQELLMIIYQI

SEQ ID NO: 6566 - protein, 21 aa, Homo sapiens
KKYCHALSLSFATFGCFGSLP

SEQ ID NO: 6567 - protein, 21 aa, Homo sapiens
LMAHCIQSPPSSRNYCQFHWL

SEQ ID NO: 6568 - protein, 21 aa, Homo sapiens
LMWMFPLNQKGMPPVVLLSKI

SEQ ID NO: 6569 - protein, 21 aa, Homo sapiens
MFAHSQMRLNSKNAHLPIISF

SEQ ID NO: 6570 - protein, 21 aa, Homo sapiens
NFRWWKGLPGLSKVFLTVMHQ

SEQ ID NO: 6571 - protein, 21 aa, Homo sapiens
PLHLVELQNVFSWQQWHMIAM

SEQ ID NO: 6572 - protein, 21 aa, Homo sapiens
PTASSWLSMTRSFCSSTWCCC

SEQ ID NO: 6573 - protein, 21 aa, Homo sapiens
QSFAAKNISSTFDFIVANNGL

SEQ ID NO: 6574 - protein, 21 aa, Homo sapiens
RHTGFSFCFSSLSSISCGYYG

SEQ ID NO: 6575 - protein, 21 aa, Homo sapiens
RISLFLGSHPFRARILCLTPC

SEQ ID NO: 6576 - protein, 21 aa, Homo sapiens
SKFTSLDSAAYCHERCWQFSN

SEQ ID NO: 6577 - protein, 21 aa, Homo sapiens
SKPGFQLLLARGHHERCPFAC

SEQ ID NO: 6578 - protein, 21 aa, Homo sapiens
SSYILLELLVNFLQYTLPCRM

SEQ ID NO: 6579 - protein, 21 aa, Homo sapiens
TAKRRKPCLCTVSLASTSGKL

SEQ ID NO: 6580 - protein, 21 aa, Homo sapiens
VSPAFLNFMDLLLTIKLELCV

SEQ ID NO: 6581 - protein, 20 aa, Homo sapiens
APTRSPTTSNYRKWRCCVNW

SEQ ID NO: 6582 - protein, 20 aa, Homo sapiens
FFASWITISGCWMAYSDTSL

SEQ ID NO: 6583 - protein, 20 aa, Homo sapiens
FFYDTSFWPKHSPLYPYSFG

SEQ ID NO: 6584 - protein, 20 aa, Homo sapiens
FTGSLLALYGVTIAFIYLPF

SEQ ID NO: 6585 - protein, 20 aa, Homo sapiens
IADQSLYHHLIQFAILITQV

SEQ ID NO: 6586 - protein, 20 aa, Homo sapiens
IFLYYSSCCIQLPLLTRFFR

SEQ ID NO: 6587 - protein, 20 aa, Homo sapiens
IKIQVSPGTGGRHRIPRGRS

SEQ ID NO: 6588 - protein, 20 aa, Homo sapiens
IVSSGPPAPISRDLRVLSQG

SEQ ID NO: 6589 - protein, 20 aa, Homo sapiens
LEAGHRTVYGKLAGNLRFHC

SEQ ID NO: 6590 - protein, 20 aa, Homo sapiens
LLTLDMEASLLFFLQRSQHR

SEQ ID NO: 6591 - protein, 20 aa, Homo sapiens
MRWIKQMKLRETRANRCSLF

SEQ ID NO: 6592 - protein, 20 aa, Homo sapiens
MSCVHDDSAGKPPHHGHRDL

SEQ ID NO: 6593 - protein, 20 aa, Homo sapiens
NAMLMAQYLMNIVGHFQNQQ

SEQ ID NO: 6594 - protein, 20 aa, Homo sapiens
PAALSQSCLRNVWHWPCCGL

SEQ ID NO: 6595 - protein, 20 aa, Homo sapiens
QIHKYRSTKIQIPIAGLFYI

SEQ ID NO: 6596 - protein, 20 aa, Homo sapiens
WIAEVWPWCWQSASSPSSPQ

SEQ ID NO: 6597 - protein, 19 aa, Homo sapiens
AFYLASVLKKASKERGLCC

SEQ ID NO: 6598 - skipped

SEQ ID NO: 6599 - protein, 19 aa, Homo sapiens
FTWFAWCHNAYYGFYCSSW

SEQ ID NO: 6600 - protein, 19 aa, Homo sapiens
GAEKATIFKVPRLAPALPI

SEQ ID NO: 6601 - protein, 19 aa, Homo sapiens
LPIYHSWIFVTPHVQSHKC

SEQ ID NO: 6602 - protein, 19 aa, Homo sapiens
LQRNRYVSFWLEIKDIGRA

SEQ ID NO: 6603 - protein, 19 aa, Homo sapiens
LSIYGTGRYHLFLIITIFV

SEQ ID NO: 6604 - protein, 19 aa, Homo sapiens
LTSDSNAPEAAAGICVLCH

SEQ ID NO: 6605 - skipped

SEQ ID NO: 6606 - protein, 19 aa, Homo sapiens
MNLTREPSRVLKSLWKEWH

SEQ ID NO: 6607 - protein, 19 aa, Homo sapiens
PRSETLSKAQIINSAATSP

SEQ ID NO: 6608 - protein, 19 aa, Homo sapiens
SIQLGPFSCQLLLLQPINF

SEQ ID NO: 6609 - protein, 19 aa, Homo sapiens
SVLSLPCSFTCILPSPGCH

SEQ ID NO: 6610 - protein, 19 aa, Homo sapiens
TGTAPALMPSCIIINQEAA

SEQ ID NO: 6611 - protein, 19 aa, Homo sapiens
VHLPHHTDWKSAHHLGHLC

SEQ ID NO: 6612 - protein, 19 aa, Homo sapiens
VIFLESPNLPAWTLTSLKY

SEQ ID NO: 6613 - protein, 19 aa, Homo sapiens
WNSLWVKEFGEAALVYGIT

SEQ ID NO: 6614 - protein, 19 aa, Homo sapiens
YLCLAVHISCVSGSCHNLC

SEQ ID NO: 6615 - protein, 19 aa, Homo sapiens
YQLPARVKVCQQLSKGKLR

SEQ ID NO: 6616 - protein, 19 aa, Homo sapiens
YSWSKCRTRINSPTDRSQH

SEQ ID NO: 6617 - protein, 18 aa, Homo sapiens
CCPKPILEFTNWGYIPQH

SEQ ID NO: 6618 - protein, 18 aa, Homo sapiens
CKQSIWIFAGSAASSDYW

SEQ ID NO: 6619 - protein, 18 aa, Homo sapiens
CVWTGLVILLSGENQPAL

SEQ ID NO: 6620 - protein, 18 aa, Homo sapiens
DQSSITSHIEFSKTCILS

SEQ ID NO: 6621 - protein, 18 aa, Homo sapiens
FDPRKLDCWGKRCQGPKV

SEQ ID NO: 6622 - protein, 18 aa, Homo sapiens
FHCNWRNHRMFSLGNNGI

SEQ ID NO: 6623 - protein, 18 aa, Homo sapiens
FLCIWWNYRMFSLGNNGI

SEQ ID NO: 6624 - protein, 18 aa, Homo sapiens
FLGGWIWSIDCICQLQQI

SEQ ID NO: 6625 - protein, 18 aa, Homo sapiens
FPCNHCNHRMFSLGNNGI

SEQ ID NO: 6626 - protein, 18 aa, Homo sapiens
FSQFVKKTREKSHWRETL

SEQ ID NO: 6627 - protein, 18 aa, Homo sapiens
FSQGARLLQGHREHADAP

SEQ ID NO: 6628 - protein, 18 aa, Homo sapiens
FVCNQCNHGMFSLGNDGI

SEQ ID NO: 6629 - protein, 18 aa, Homo sapiens
GAIGCCQPMLLRHGIYLN

SEQ ID NO: 6630 - protein, 18 aa, Homo sapiens
GWLCSNRKLEIQRCITCF

SEQ ID NO: 6631 - protein, 18 aa, Homo sapiens
ILRCCDHHISSVAFPASW

SEQ ID NO: 6632 - protein, 18 aa, Homo sapiens
LFLECCQLYLKGEMQHIW

SEQ ID NO: 6633 - protein, 18 aa, Homo sapiens
LKCFFQIFKKLKQNLEIL

SEQ ID NO: 6634 - protein, 18 aa, Homo sapiens
LLLLGAPLHQTTESGGAV

SEQ ID NO: 6635 - protein, 18 aa, Homo sapiens
LPSCPFWMSCSHLSLPPR

SEQ ID NO: 6636 - protein, 18 aa, Homo sapiens
LRFLRTMKQWPKFCSAGI

SEQ ID NO: 6637 - protein, 18 aa, Homo sapiens
LSVIPYETYENSHWRETV

SEQ ID NO: 6638 - protein, 18 aa, Homo sapiens
PCWQPQTLHLTPAFFPKC

SEQ ID NO: 6639 - protein, 18 aa, Homo sapiens
PHWKLPKIRLLLRVFLFA

SEQ ID NO: 6640 - protein, 18 aa, Homo sapiens
PMSLGNCSCNPDKCKIII

SEQ ID NO: 6641 - protein, 18 aa, Homo sapiens
QALIQFRELGVKTYFRPS

SEQ ID NO: 6642 - protein, 18 aa, Homo sapiens
RLYLCLFKKKVMGLFIVV

SEQ ID NO: 6643 - protein, 18 aa, Homo sapiens
SEQTNHIRIAISLSVEAD

SEQ ID NO: 6644 - protein, 18 aa, Homo sapiens
TSFIIQKQDLCFLLFLHI

SEQ ID NO: 6645 - protein, 18 aa, Homo sapiens
TSFIIQKQDLCFLLFLRI

SEQ ID NO: 6646-6647 - skipped (2 entries)

SEQ ID NO: 6648 - protein, 17 aa, Homo sapiens
CRPWKQIGRADPHFQGP

SEQ ID NO: 6649 - protein, 17 aa, Homo sapiens
CYISWSYRVLPPGLHVL

SEQ ID NO: 6650 - protein, 17 aa, Homo sapiens
FFSGWGKFALHHSIPET

SEQ ID NO: 6651 - protein, 17 aa, Homo sapiens
FFSTSWRRAHWKSGTSG

SEQ ID NO: 6652 - protein, 17 aa, Homo sapiens
FHCPRPSGSGSLCLLLL

SEQ ID NO: 6653 - protein, 17 aa, Homo sapiens
GLLVRIAQQMARSSMKG

SEQ ID NO: 6654 - protein, 17 aa, Homo sapiens
HGWIQAIWRLHCFLYLQ

SEQ ID NO: 6655 - protein, 17 aa, Homo sapiens
HMPRKHFTRQSTGTIAY

SEQ ID NO: 6656 - protein, 17 aa, Homo sapiens
IIGATLILSMTGQEQSL

SEQ ID NO: 6657 - protein, 17 aa, Homo sapiens
KPSRIMMNLEVQDEPLA

SEQ ID NO: 6658 - protein, 17 aa, Homo sapiens
KTRTVMKSTYLDSLSVN

SEQ ID NO: 6659 - protein, 17 aa, Homo sapiens
KTTSSSLCWNLSLEGLT

SEQ ID NO: 6660 - protein, 17 aa, Homo sapiens
LHILGGYRIFPSSCSVL

SEQ ID NO: 6661-6662 - skipped (2 entries)

SEQ ID NO: 6663 - protein, 17 aa, Homo sapiens
LYPSLLNQSPCLELLKV

SEQ ID NO: 6664 - protein, 17 aa, Homo sapiens
LYSALLGHNFTSQKEIS

SEQ ID NO: 6665 - protein, 17 aa, Homo sapiens
MKLEEILGNAALMMTLT

SEQ ID NO: 6666 - protein, 17 aa, Homo sapiens
NAVRKSETKLQVPLQPL

SEQ ID NO: 6667 - protein, 17 aa, Homo sapiens
NPEFVSFFQASRCWITR

SEQ ID NO: 6668 - protein, 17 aa, Homo sapiens
PLWIIICIFCFNADTSF

SEQ ID NO: 6669 - protein, 17 aa, Homo sapiens
PMLLSPLVRLLQPSICQ

SEQ ID NO: 6670 - protein, 17 aa, Homo sapiens
QCMERRLVNLIPLRLFY

SEQ ID NO: 6671 - protein, 17 aa, Homo sapiens
QKSTCRSILKTRRRLSC

SEQ ID NO: 6672 - skipped

SEQ ID NO: 6673 - protein, 17 aa, Homo sapiens
TFWRPSTLSDTSSSCCS

SEQ ID NO: 6674 - protein, 17 aa, Homo sapiens
YGDGIQKTLCYGICEVL

SEQ ID NO: 6675 - protein, 16 aa, Homo sapiens
CHLSCLQSTSYHSNQL

SEQ ID NO: 6676 - protein, 16 aa, Homo sapiens
CTLFYIRFKIPVLWEN

SEQ ID NO: 6677 - protein, 16 aa, Homo sapiens
CWIWSYSFHGLQVAEK

SEQ ID NO: 6678 - protein, 16 aa, Homo sapiens
DLLQEWSPLREEPVCF

SEQ ID NO: 6679 - protein, 16 aa, Homo sapiens
FIPGGEKISKCFLPGG

SEQ ID NO: 6680 - protein, 16 aa, Homo sapiens
FSHHVFSLWKERCSSL

SEQ ID NO: 6681 - protein, 16 aa, Homo sapiens
GDRIGIWDLSQIFYAT

SEQ ID NO: 6682 - protein, 16 aa, Homo sapiens
HKRKPIKRAEPSRQSF

SEQ ID NO: 6683 - protein, 16 aa, Homo sapiens
HYGVCDDYFDHSKSGL

SEQ ID NO: 6684 - protein, 16 aa, Homo sapiens
ISRFGPGLMEPSMQNS

SEQ ID NO: 6685 - protein, 16 aa, Homo sapiens
KKSRRKKKMVLICPLS

SEQ ID NO: 6686 - protein, 16 aa, Homo sapiens
KPQICPMILRTLSCTG

SEQ ID NO: 6687 - protein, 16 aa, Homo sapiens
LCSWELFSSWSSLPEF

SEQ ID NO: 6688 - protein, 16 aa, Homo sapiens
LFLISCLLAKLRLFFP

SEQ ID NO: 6689 - skipped

SEQ ID NO: 6690 - protein, 16 aa, Homo sapiens
LQSHVPKSCLSRRESM

SEQ ID NO: 6691 - protein, 16 aa, Homo sapiens
LVCVLSYGCVASFCFR

SEQ ID NO: 6692 - protein, 16 aa, Homo sapiens
LYSALLGHNFTSQKQF

SEQ ID NO: 6693 - protein, 16 aa, Homo sapiens
MATSSHRFLEDMLPAK

SEQ ID NO: 6694 - protein, 16 aa, Homo sapiens
PFLISCLLAKLRLFFP

SEQ ID NO: 6695 - protein, 16 aa, Homo sapiens
QPLCLQTQLAQNCMKL

SEQ ID NO: 6696 - protein, 16 aa, Homo sapiens
RPLQPSDSVLMMLFMA

SEQ ID NO: 6697 - skipped

SEQ ID NO: 6698 - protein, 16 aa, Homo sapiens
SGSGKPAASRDDAPQR

SEQ ID NO: 6699 - protein, 16 aa, Homo sapiens
SIAHAQFPGRVRRALL

SEQ ID NO: 6700 - protein, 16 aa, Homo sapiens
STRRTDLEQRNSLLLL

SEQ ID NO: 6701 - protein, 16 aa, Homo sapiens
STRWKPCLNHHWFLVE

SEQ ID NO: 6702 - protein, 16 aa, Homo sapiens
SYAWRHGVSPSDSDGL

SEQ ID NO: 6703 - protein, 16 aa, Homo sapiens
VFGLSSYGNQPSKSLL

SEQ ID NO: 6704 - protein, 16 aa, Homo sapiens
VVMEKVDTTIMTLLQI

SEQ ID NO: 6705 - protein, 16 aa, Homo sapiens
WRAQTIILSLLPVMVL

SEQ ID NO: 6706 - protein, 15 aa, Homo sapiens
FRTGQPPSAYLCVSC

SEQ ID NO: 6707 - protein, 15 aa, Homo sapiens
FTGYNRVFLFISYGL

SEQ ID NO: 6708 - protein, 15 aa, Homo sapiens
GRARGLGWDVEGGGR

SEQ ID NO: 6709 - protein, 15 aa, Homo sapiens
HLNKGRRLGDKIRAT

SEQ ID NO: 6710 - protein, 15 aa, Homo sapiens
HLPVGCSFHSVHQHL

SEQ ID NO: 6711 - protein, 15 aa, Homo sapiens
HLVCLVPQCLLWILL

SEQ ID NO: 6712 - protein, 15 aa, Homo sapiens
IVLDYFLFLQMLPCL

SEQ ID NO: 6713 - protein, 15 aa, Homo sapiens
IVQLLIGHSLLLQKL

SEQ ID NO: 6714 - protein, 15 aa, Homo sapiens
IYFYIIHHVVSSCLC

SEQ ID NO: 6715 - protein, 15 aa, Homo sapiens
KHLLCFRILPWRTSL

SEQ ID NO: 6716 - protein, 15 aa, Homo sapiens
LAPLFPGPVRPGQVF

SEQ ID NO: 6717 - protein, 15 aa, Homo sapiens
LERVKLLIIPASMKK

SEQ ID NO: 6718 - protein, 15 aa, Homo sapiens
LFLQLFSISWTYYSL

SEQ ID NO: 6719 - protein, 15 aa, Homo sapiens
LLHLWQMFQQALLPL

SEQ ID NO: 6720 - protein, 15 aa, Homo sapiens
LLMMMTTSREMPSLN

SEQ ID NO: 6721 - protein, 15 aa, Homo sapiens
LMPPRLCLNLRVKMS

SEQ ID NO: 6722 - protein, 15 aa, Homo sapiens
LPFWDRPAAQTTLWI

SEQ ID NO: 6723 - protein, 15 aa, Homo sapiens
LPSCLLPLERKVLIS

SEQ ID NO: 6724 - protein, 15 aa, Homo sapiens
LVRSQLLEKFLQLRF

SEQ ID NO: 6725 - protein, 15 aa, Homo sapiens
MHLYLELCRFSTGGV

SEQ ID NO: 6726 - protein, 15 aa, Homo sapiens
PRLFSVRDKKRALQV

SEQ ID NO: 6727 - protein, 15 aa, Homo sapiens
QMLKVTLLLAQQIQL

SEQ ID NO: 6728 - protein, 15 aa, Homo sapiens
QTAESATVRMEYIFS

SEQ ID NO: 6729 - protein, 15 aa, Homo sapiens
SHPSAATKYEPGSYI

SEQ ID NO: 6730 - protein, 15 aa, Homo sapiens
SNLEKVLNNHLLRPV

SEQ ID NO: 6731 - protein, 15 aa, Homo sapiens
TYFFRIAGVCLMTEN

SEQ ID NO: 6732 - protein, 15 aa, Homo sapiens
VDSSSYHPFKINQNI

SEQ ID NO: 6733 - protein, 15 aa, Homo sapiens
VIVNLSTMGPSVNLM

SEQ ID NO: 6734 - protein, 15 aa, Homo sapiens
WIRSARENIRIGVSY

SEQ ID NO: 6735-6736 - skipped (2 entries)

SEQ ID NO: 6737 - protein, 14 aa, Homo sapiens
ASWLTSCYFFLEEK

SEQ ID NO: 6738 - protein, 14 aa, Homo sapiens
CCKCLQNIGKSSKH

SEQ ID NO: 6739 - protein, 14 aa, Homo sapiens
CCVSCFWTRAVSGL

SEQ ID NO: 6740 - skipped

SEQ ID NO: 6741 - protein, 14 aa, Homo sapiens
FIYSLFFFSSSPVS

SEQ ID NO: 6742 - protein, 14 aa, Homo sapiens
FIYSLFFLSSSPVS

SEQ ID NO: 6743 - protein, 14 aa, Homo sapiens
FRNHLLYFGCKIQP

SEQ ID NO: 6744 - protein, 14 aa, Homo sapiens
FRYTNTGAPRSKFL

SEQ ID NO: 6745 - protein, 14 aa, Homo sapiens
GRTGRCHRRICFQT

SEQ ID NO: 6746 - protein, 14 aa, Homo sapiens
KQRKGTSCQFQDII

SEQ ID NO: 6747 - protein, 14 aa, Homo sapiens
LCGQATPGAQMVPN

SEQ ID NO: 6748 - protein, 14 aa, Homo sapiens
LKKKMLSLKNILLN

SEQ ID NO: 6749 - protein, 14 aa, Homo sapiens
LLPIWHDLCFGELL

SEQ ID NO: 6750 - protein, 14 aa, Homo sapiens
LLSPLGPQLPSPGT

SEQ ID NO: 6751 - protein, 14 aa, Homo sapiens
LTFYIISSEKITPW

SEQ ID NO: 6752 - protein, 14 aa, Homo sapiens
LVESISIFSHSTSD

SEQ ID NO: 6753 - protein, 14 aa, Homo sapiens
LYLSPTVEGSSLLS

SEQ ID NO: 6754 - protein, 14 aa, Homo sapiens
LYYKPSAFKNSTSN

SEQ ID NO: 6755 - protein, 14 aa, Homo sapiens
NIIILKEEDNQKKN

SEQ ID NO: 6756 - protein, 14 aa, Homo sapiens
QCLSGSISMDIGTK

SEQ ID NO: 6757 - protein, 14 aa, Homo sapiens
QTWKKNHLTQTTLK

SEQ ID NO: 6758 - protein, 14 aa, Homo sapiens
RNGTSLPSHHSWNS

SEQ ID NO: 6759 - protein, 14 aa, Homo sapiens
SATCLWLTSVSLPT

SEQ ID NO: 6760 - protein, 14 aa, Homo sapiens
SGWTQSRGKPQTFH

SEQ ID NO: 6761 - protein, 14 aa, Homo sapiens
SLPETALKQYACTV

SEQ ID NO: 6762 - protein, 14 aa, Homo sapiens
TARPVMMTSQIPKE

SEQ ID NO: 6763 - protein, 14 aa, Homo sapiens
TLSLYGHLYMRVLP

SEQ ID NO: 6764 - protein, 14 aa, Homo sapiens
VLWKASGTIQFNCK

SEQ ID NO: 6765 - protein, 14 aa, Homo sapiens
VPGFNGDAYDVSHL

SEQ ID NO: 6766 - skipped

SEQ ID NO: 6767 - protein, 14 aa, Homo sapiens
WNIFNKYSEDRRRE

SEQ ID NO: 6768 - skipped

SEQ ID NO: 6769 - protein, 14 aa, Homo sapiens
YSKSLEFVLRKSKH

SEQ ID NO: 6770 - protein, 13 aa, Homo sapiens
ASCLSDGFLPASA

SEQ ID NO: 6771 - protein, 13 aa, Homo sapiens
CSSGAAAKSSFEE

SEQ ID NO: 6772 - skipped

SEQ ID NO: 6773 - protein, 13 aa, Homo sapiens
FFILKRRLFCSTL

SEQ ID NO: 6774 - protein, 13 aa, Homo sapiens
FPVWVCERSEDCK

SEQ ID NO: 6775 - protein, 13 aa, Homo sapiens
FSSCSTRCPTYCS

SEQ ID NO: 6776 - protein, 13 aa, Homo sapiens
FTTLRFSSDCRRS

SEQ ID NO: 6777 - protein, 13 aa, Homo sapiens
GTQMLNIRTNIEV

SEQ ID NO: 6778 - protein, 13 aa, Homo sapiens
GWVLFKWIWYPEQ

SEQ ID NO: 6779 - protein, 13 aa, Homo sapiens
HSSDFYVFGSSLF

SEQ ID NO: 6780 - protein, 13 aa, Homo sapiens
KTWISAPPGKRSS

SEQ ID NO: 6781 - protein, 13 aa, Homo sapiens
LCLYMALGVTTYS

SEQ ID NO: 6782 - protein, 13 aa, Homo sapiens
LDMELLFPWLTGC

SEQ ID NO: 6783 - protein, 13 aa, Homo sapiens
LHCILQRTMDMNR

SEQ ID NO: 6784 - skipped

SEQ ID NO: 6785 - protein, 13 aa, Homo sapiens
LQECRRERKTRES

SEQ ID NO: 6786 - protein, 13 aa, Homo sapiens
LRHSVKKKVLVRL

SEQ ID NO: 6787 - protein, 13 aa, Homo sapiens
LSISYHQNWKNLH

SEQ ID NO: 6788 - skipped

SEQ ID NO: 6789 - protein, 13 aa, Homo sapiens
PGNQSALLKKRQR

SEQ ID NO: 6790 - protein, 13 aa, Homo sapiens
PTASQSQGLSAAV

SEQ ID NO: 6791 - protein, 13 aa, Homo sapiens
PVQDNIPRWINSI

SEQ ID NO: 6792 - protein, 13 aa, Homo sapiens
RDISNSSNWKQDG

SEQ ID NO: 6793 - protein, 13 aa, Homo sapiens
SKLSQVVRKTSSN

SEQ ID NO: 6794 - skipped

SEQ ID NO: 6795 - protein, 13 aa, Homo sapiens
VLFCFGGDRLTLH

SEQ ID NO: 6796 - protein, 13 aa, Homo sapiens
VPLFAHCQQNTSL

SEQ ID NO: 6797 - protein, 13 aa, Homo sapiens
WETFLVWIFLILQ

SEQ ID NO: 6798 - protein, 13 aa, Homo sapiens
WRHRDLHSHRDGL

SEQ ID NO: 6799 - protein, 13 aa, Homo sapiens
WRWNTKNSLLWNL

SEQ ID NO: 6800 - protein, 13 aa, Homo sapiens
WRYSGGALWAGDQ

SEQ ID NO: 6801 - protein, 13 aa, Homo sapiens
WTPYNHYGLDLWL

SEQ ID NO: 6802 - protein, 13 aa, Homo sapiens
YAKRSRLFEQVGW

SEQ ID NO: 6803 - protein, 13 aa, Homo sapiens
YALFFQLCTQQMF

SEQ ID NO: 6804 - protein, 13 aa, Homo sapiens
YFFVKFKSWWCRT

SEQ ID NO: 6805 - protein, 13 aa, Homo sapiens
YWSDHSCWKSSSS

SEQ ID NO: 6806 - protein, 12 aa, Homo sapiens
AKKQICLILVGD

SEQ ID NO: 6807 - skipped

SEQ ID NO: 6808 - protein, 12 aa, Homo sapiens
AVQILLTVYQTK

SEQ ID NO: 6809 - protein, 12 aa, Homo sapiens
CDKKCQSCCLHL

SEQ ID NO: 6810 - protein, 12 aa, Homo sapiens
CGNWHCPNFYPL

SEQ ID NO: 6811 - protein, 12 aa, Homo sapiens
CGSIIILLEIHY

SEQ ID NO: 6812 - protein, 12 aa, Homo sapiens
CGSSCVRGCGGK

SEQ ID NO: 6813 - protein, 12 aa, Homo sapiens
CTYICRIWILSL

SEQ ID NO: 6814 - protein, 12 aa, Homo sapiens
EFYSRGKWWRLW

SEQ ID NO: 6815 - protein, 12 aa, Homo sapiens
EIYLIGFSSILP

SEQ ID NO: 6816 - protein, 12 aa, Homo sapiens
FLITLWWTWGGQ

SEQ ID NO: 6817 - protein, 12 aa, Homo sapiens
FLVPLAIIMALQ

SEQ ID NO: 6818 - protein, 12 aa, Homo sapiens
FQTCKYTYHCCS

SEQ ID NO: 6819 - protein, 12 aa, Homo sapiens
GCGREIVCTDSI

SEQ ID NO: 6820 - protein, 12 aa, Homo sapiens
GKCYHPDVSNTK

SEQ ID NO: 6821 - protein, 12 aa, Homo sapiens
GSPNPFLYRQRK

SEQ ID NO: 6822 - protein, 12 aa, Homo sapiens
IMVQRWACISAL

SEQ ID NO: 6823 - protein, 12 aa, Homo sapiens
KGVQILERKCTI

SEQ ID NO: 6824 - protein, 12 aa, Homo sapiens
LGELPCISRIFN

SEQ ID NO: 6825 - protein, 12 aa, Homo sapiens
LHPQKETLLLNI

SEQ ID NO: 6826 - protein, 12 aa, Homo sapiens
LRHSSTGHTLFE

SEQ ID NO: 6827 - protein, 12 aa, Homo sapiens
LSESNSVFQSFH

SEQ ID NO: 6828 - protein, 12 aa, Homo sapiens
LTLKIKIFIGKM

SEQ ID NO: 6829 - protein, 12 aa, Homo sapiens
MAFEQNLPHTQV

SEQ ID NO: 6830 - protein, 12 aa, Homo sapiens
MRRLEERWENKL

SEQ ID NO: 6831 - protein, 12 aa, Homo sapiens
PKASTVCFYLFW

SEQ ID NO: 6832 - protein, 12 aa, Homo sapiens
PSATRCMGSRQW

SEQ ID NO: 6833 - skipped

SEQ ID NO: 6834 - protein, 12 aa, Homo sapiens
QWMTCFLYSQFH

SEQ ID NO: 6835 - protein, 12 aa, Homo sapiens
RASVCWVTVYFP

SEQ ID NO: 6836 - protein, 12 aa, Homo sapiens
SASDSICKWTGT

SEQ ID NO: 6837 - protein, 12 aa, Homo sapiens
SHCAQTDSTRVF

SEQ ID NO: 6838 - protein, 12 aa, Homo sapiens
SKCSKFLRRCNL

SEQ ID NO: 6839 - protein, 12 aa, Homo sapiens
SLSQAGHRFWIC

SEQ ID NO: 6840 - protein, 12 aa, Homo sapiens
SSPSYPHPVQNA

SEQ ID NO: 6841 - protein, 12 aa, Homo sapiens
SWVYPQISGLSL

SEQ ID NO: 6842 - protein, 12 aa, Homo sapiens
THCLLVSSRSIC

SEQ ID NO: 6843 - protein, 12 aa, Homo sapiens
WPCSHLFNSWSD

SEQ ID NO: 6844 - protein, 12 aa, Homo sapiens
WSLLSSYWLYHF

SEQ ID NO: 6845 - protein, 12 aa, Homo sapiens
YDSCYSRIRRES

SEQ ID NO: 6846 - protein, 12 aa, Homo sapiens
YTIRVSSHMARR

SEQ ID NO: 6847 - protein, 11 aa, Homo sapiens
CLEAWRIKIPK

SEQ ID NO: 6848 - protein, 11 aa, Homo sapiens
CLFALLAQCLC

SEQ ID NO: 6849 - protein, 11 aa, Homo sapiens
CNAFPAASRWI

SEQ ID NO: 6850 - protein, 11 aa, Homo sapiens
ECWFQQQIEML

SEQ ID NO: 6851 - protein, 11 aa, Homo sapiens
FFKGRYPYFRE

SEQ ID NO: 6852 - protein, 11 aa, Homo sapiens
FFPKVHPVYLC

SEQ ID NO: 6853 - protein, 11 aa, Homo sapiens
FIFYCNSPMPL

SEQ ID NO: 6854 - skipped

SEQ ID NO: 6855 - protein, 11 aa, Homo sapiens
FLYLGHIHFNL

SEQ ID NO: 6856 - protein, 11 aa, Homo sapiens
FWSIKLWKPTK

SEQ ID NO: 6857 - protein, 11 aa, Homo sapiens
GMRVVNTLGHY

SEQ ID NO: 6858 - protein, 11 aa, Homo sapiens
GVCIFCTIYKP

SEQ ID NO: 6859 - skipped

SEQ ID NO: 6860 - protein, 11 aa, Homo sapiens
HSIAYCSVLWT

SEQ ID NO: 6861 - protein, 11 aa, Homo sapiens
HYFSVHLSLHL

SEQ ID NO: 6862 - protein, 11 aa, Homo sapiens
ITITLKIFLLT

SEQ ID NO: 6863 - protein, 11 aa, Homo sapiens
KDCVLLGCFFS

SEQ ID NO: 6864 - protein, 11 aa, Homo sapiens
KEDKKCTQFGT

SEQ ID NO: 6865 - protein, 11 aa, Homo sapiens
KNMIGVKYKSY

SEQ ID NO: 6866 - protein, 11 aa, Homo sapiens
KSWILWKIVFI

SEQ ID NO: 6867 - skipped

SEQ ID NO: 6868 - protein, 11 aa, Homo sapiens
LCLEYFISKSI

SEQ ID NO: 6869 - protein, 11 aa, Homo sapiens
LCQCHLPAVLL

SEQ ID NO: 6870 - protein, 11 aa, Homo sapiens
LCYLKQTQRKA

SEQ ID NO: 6871 - protein, 11 aa, Homo sapiens
LGRKRYYGLCQ

SEQ ID NO: 6872 - protein, 11 aa, Homo sapiens
LHHSLCLRYHL

SEQ ID NO: 6873 - protein, 11 aa, Homo sapiens
LLRLGEICIAS

SEQ ID NO: 6874 - protein, 11 aa, Homo sapiens
LMTCFKPVWFI

SEQ ID NO: 6875 - protein, 11 aa, Homo sapiens
LPLCSCLSFLP

SEQ ID NO: 6876 - protein, 11 aa, Homo sapiens
LPRSQTASRTS

SEQ ID NO: 6877 - protein, 11 aa, Homo sapiens
LTWPSLTSLWV

SEQ ID NO: 6878 - protein, 11 aa, Homo sapiens
LVMVMVWIRLL

SEQ ID NO: 6879 - protein, 11 aa, Homo sapiens
LVSGLSFVSLY

SEQ ID NO: 6880 - protein, 11 aa, Homo sapiens
LWTPHLIIHSR

SEQ ID NO: 6881 - protein, 11 aa, Homo sapiens
NLCVWVTLKAI

SEQ ID NO: 6882 - protein, 11 aa, Homo sapiens
NPRKATQSFHF

SEQ ID NO: 6883 - protein, 11 aa, Homo sapiens
PICSSSTPSCK

SEQ ID NO: 6884 - protein, 11 aa, Homo sapiens
PLETCATSYCR

SEQ ID NO: 6885 - protein, 11 aa, Homo sapiens
QIAGVCLKTKN

SEQ ID NO: 6886 - protein, 11 aa, Homo sapiens
QIAGVCLMTEN

SEQ ID NO: 6887 - protein, 11 aa, Homo sapiens
QYLPLILFLSG

SEQ ID NO: 6888 - protein, 11 aa, Homo sapiens
RIAGVCLMTEN

SEQ ID NO: 6889 - protein, 11 aa, Homo sapiens
SFQKKLMKNPP

SEQ ID NO: 6890 - skipped

SEQ ID NO: 6891 - protein, 11 aa, Homo sapiens
SSILIKMFAYW

SEQ ID NO: 6892 - protein, 11 aa, Homo sapiens
SYYVHEAKSSV

SEQ ID NO: 6893 - protein, 11 aa, Homo sapiens
TSSRTPPSASW

SEQ ID NO: 6894-6895 - skipped (2 entries)

SEQ ID NO: 6896 - protein, 11 aa, Homo sapiens
VFLTSIHSVAL

SEQ ID NO: 6897 - protein, 11 aa, Homo sapiens
VSTWEHCWVIC

SEQ ID NO: 6898 - protein, 11 aa, Homo sapiens
VWFSVGPAWSC

SEQ ID NO: 6899 - protein, 11 aa, Homo sapiens
WNYMKLLLEQQ

SEQ ID NO: 6900 - protein, 11 aa, Homo sapiens
YCKICKMQKHI

SEQ ID NO: 6901 - skipped

SEQ ID NO: 6902 - protein, 10 aa, Homo sapiens
CLLHLLLVLH

SEQ ID NO: 6903 - protein, 10 aa, Homo sapiens
CPHYILGSIC

SEQ ID NO: 6904 - protein, 10 aa, Homo sapiens
EILRRSSLGR

SEQ ID NO: 6905 - protein, 10 aa, Homo sapiens
ESTRFLAFKE

SEQ ID NO: 6906 - protein, 10 aa, Homo sapiens
FFTLCMRSLS

SEQ ID NO: 6907 - protein, 10 aa, Homo sapiens
FKWSSGKILI

SEQ ID NO: 6908 - protein, 10 aa, Homo sapiens
FLLSIKCFSK

SEQ ID NO: 6909 - protein, 10 aa, Homo sapiens
FMDYHLYFLL

SEQ ID NO: 6910 - skipped

SEQ ID NO: 6911 - protein, 10 aa, Homo sapiens
FYFWNVVNYI

SEQ ID NO: 6912 - protein, 10 aa, Homo sapiens
GEGSSVAGSN

SEQ ID NO: 6913 - protein, 10 aa, Homo sapiens
GHVGSHRHCT

SEQ ID NO: 6914 - skipped

SEQ ID NO: 6915 - protein, 10 aa, Homo sapiens
KRWIRKIKCI

SEQ ID NO: 6916 - protein, 10 aa, Homo sapiens
KVLSPRCFEH

SEQ ID NO: 6917 - protein, 10 aa, Homo sapiens
LCLEARSVSF

SEQ ID NO: 6918 - protein, 10 aa, Homo sapiens
LEVFAWRKLH

SEQ ID NO: 6919 - protein, 10 aa, Homo sapiens
LFFCSSFITF

SEQ ID NO: 6920 - protein, 10 aa, Homo sapiens
LLEKVGLNFV

SEQ ID NO: 6921 - protein, 10 aa, Homo sapiens
LPDCNLPGNS

SEQ ID NO: 6922 - protein, 10 aa, Homo sapiens
LVFWTPSCTI

SEQ ID NO: 6923 - skipped

SEQ ID NO: 6924 - protein, 10 aa, Homo sapiens
LVWLKCTFQT

SEQ ID NO: 6925 - protein, 10 aa, Homo sapiens
LWTQPTWPRS

SEQ ID NO: 6926 - protein, 10 aa, Homo sapiens
MGSVLMQCIC

SEQ ID NO: 6927 - protein, 10 aa, Homo sapiens
PGDSSGAVHK

SEQ ID NO: 6928 - protein, 10 aa, Homo sapiens
QEAIPSEGFK

SEQ ID NO: 6929 - protein, 10 aa, Homo sapiens
QLGSKRQGRF

SEQ ID NO: 6930 - protein, 10 aa, Homo sapiens
SCNFLRRGIL

SEQ ID NO: 6931 - protein, 10 aa, Homo sapiens
SFLHVWMTCS

SEQ ID NO: 6932 - protein, 10 aa, Homo sapiens
TEQNLVIKKN

SEQ ID NO: 6933 - protein, 10 aa, Homo sapiens
TKFEMQYLAR

SEQ ID NO: 6934 - protein, 10 aa, Homo sapiens
TQTPDKVSKP

SEQ ID NO: 6935 - protein, 10 aa, Homo sapiens
TQTWGSGTTK

SEQ ID NO: 6936 - protein, 10 aa, Homo sapiens
TRVQKREKNS

SEQ ID NO: 6937 - skipped

SEQ ID NO: 6938 - protein, 10 aa, Homo sapiens
VYPWCWNEWK

SEQ ID NO: 6939 - protein, 10 aa, Homo sapiens
YHLISCWSCW

SEQ ID NO: 6940 - protein, 10 aa, Homo sapiens
YQERANKKQW

SEQ ID NO: 6941 - protein, 9 aa, Homo sapiens
AGRAMGRAP

SEQ ID NO: 6942 - protein, 9 aa, Homo sapiens
ASLLGNTVG

SEQ ID NO: 6943 - protein, 9 aa, Homo sapiens
CKTSHRQMC

SEQ ID NO: 6944 - protein, 9 aa, Homo sapiens
CSFASESSC

SEQ ID NO: 6945 - protein, 9 aa, Homo sapiens
DQLMIFGLY

SEQ ID NO: 6946 - protein, 9 aa, Homo sapiens
DRVMMKKEL

SEQ ID NO: 6947 - protein, 9 aa, Homo sapiens
EMILFLMTF

SEQ ID NO: 6948 - protein, 9 aa, Homo sapiens
ESSLLCYQR

SEQ ID NO: 6949 - protein, 9 aa, Homo sapiens
FHPVFFHIY

SEQ ID NO: 6950 - protein, 9 aa, Homo sapiens
FIHLLGGSV

SEQ ID NO: 6951 - protein, 9 aa, Homo sapiens
FILDTSFWP

SEQ ID NO: 6952 - protein, 9 aa, Homo sapiens
FKRSSKVPK

SEQ ID NO: 6953 - protein, 9 aa, Homo sapiens
FLLFKREIE

SEQ ID NO: 6954 - protein, 9 aa, Homo sapiens
FLLSRSRGY

SEQ ID NO: 6955 - skipped

SEQ ID NO: 6956 - protein, 9 aa, Homo sapiens
FSLFAYKHN

SEQ ID NO: 6957 - protein, 9 aa, Homo sapiens
FSQKELREH

SEQ ID NO: 6958 - protein, 9 aa, Homo sapiens
FVCSFLFLS

SEQ ID NO: 6959 - protein, 9 aa, Homo sapiens
GAQALLNMR

SEQ ID NO: 6960 - protein, 9 aa, Homo sapiens
GKTWRQNDR

SEQ ID NO: 6961 - skipped

SEQ ID NO: 6962 - protein, 9 aa, Homo sapiens
GSQQMRLGT

SEQ ID NO: 6963 - protein, 9 aa, Homo sapiens
GVFSNWPFK

SEQ ID NO: 6964 - protein, 9 aa, Homo sapiens
HIFLSLKAT

SEQ ID NO: 6965 - protein, 9 aa, Homo sapiens
IAFSSQLFL

SEQ ID NO: 6966 - protein, 9 aa, Homo sapiens
ICLFYLCLF

SEQ ID NO: 6967 - protein, 9 aa, Homo sapiens
IPVIPAPIC

SEQ ID NO: 6968 - protein, 9 aa, Homo sapiens
IVNQTPHLQ

SEQ ID NO: 6969 - protein, 9 aa, Homo sapiens
KVMKLKISF

SEQ ID NO: 6970 - skipped

SEQ ID NO: 6971 - protein, 9 aa, Homo sapiens
LFKRISSVC

SEQ ID NO: 6972 - protein, 9 aa, Homo sapiens
LGAMGNNDM

SEQ ID NO: 6973 - protein, 9 aa, Homo sapiens
LIQRVWSLC

SEQ ID NO: 6974 - protein, 9 aa, Homo sapiens
LQLPLPGSL

SEQ ID NO: 6975 - skipped

SEQ ID NO: 6976 - protein, 9 aa, Homo sapiens
MSCFSTMST

SEQ ID NO: 6977 - protein, 9 aa, Homo sapiens
NISLREQHV

SEQ ID NO: 6978 - protein, 9 aa, Homo sapiens
PAWEPVLNP

SEQ ID NO: 6979 - protein, 9 aa, Homo sapiens
PCGNLIEAP

SEQ ID NO: 6980 - protein, 9 aa, Homo sapiens
PCTRLGLGC

SEQ ID NO: 6981 - protein, 9 aa, Homo sapiens
PKSSPLFRM

SEQ ID NO: 6982 - protein, 9 aa, Homo sapiens
PLTKRTVLS

SEQ ID NO: 6983 - protein, 9 aa, Homo sapiens
PSILIKSYI

SEQ ID NO: 6984 - protein, 9 aa, Homo sapiens
PTDWSIYGL

SEQ ID NO: 6985 - protein, 9 aa, Homo sapiens
QNSSGLIPH

SEQ ID NO: 6986 - protein, 9 aa, Homo sapiens
QVMVVGIVL

SEQ ID NO: 6987 - protein, 9 aa, Homo sapiens
QWISIRPRR

SEQ ID NO: 6988 - protein, 9 aa, Homo sapiens
RKSIAMHCH

SEQ ID NO: 6989 - protein, 9 aa, Homo sapiens
RKSLATTVP

SEQ ID NO: 6990 - protein, 9 aa, Homo sapiens
RVRIITLRT

SEQ ID NO: 6991 - protein, 9 aa, Homo sapiens
SGRAERTWL

SEQ ID NO: 6992 - protein, 9 aa, Homo sapiens
SQLLCPKAA

SEQ ID NO: 6993 - protein, 9 aa, Homo sapiens
SRAYGIFCN

SEQ ID NO: 6994 - protein, 9 aa, Homo sapiens
SRIKFGRLS

SEQ ID NO: 6995 - protein, 9 aa, Homo sapiens
SRWTNNIFH

SEQ ID NO: 6996 - protein, 9 aa, Homo sapiens
SWELPITQR

SEQ ID NO: 6997 - protein, 9 aa, Homo sapiens
TCLKMSIGA

SEQ ID NO: 6998 - protein, 9 aa, Homo sapiens
TIDLVTTCI

SEQ ID NO: 6999 - skipped

SEQ ID NO: 7000 - protein, 9 aa, Homo sapiens
TNKMKTQNV

SEQ ID NO: 7001 - protein, 9 aa, Homo sapiens
TPESLYWLS

SEQ ID NO: 7002 - protein, 9 aa, Homo sapiens
TPQVLPLTS

SEQ ID NO: 7003 - protein, 9 aa, Homo sapiens
TSFHLFHTA

SEQ ID NO: 7004 - skipped

SEQ ID NO: 7005 - protein, 9 aa, Homo sapiens
VKKSRSHFR

SEQ ID NO: 7006 - protein, 9 aa, Homo sapiens
WRDFPSTQG

SEQ ID NO: 7007 - protein, 9 aa, Homo sapiens
WTSLQLLHI

SEQ ID NO: 7008 - protein, 9 aa, Homo sapiens
WTYGSCCSF

SEQ ID NO: 7009 - protein, 9 aa, Homo sapiens
YGNGICVWR

SEQ ID NO: 7010 - protein, 9 aa, Homo sapiens
YLPEIIRIQ

SEQ ID NO: 7011 - protein, 9 aa, Homo sapiens
YRKVLAGAS

SEQ ID NO: 7012 - protein, 8 aa, Homo sapiens
ARPGLMRG

SEQ ID NO: 7013 - protein, 8 aa, Homo sapiens
CQADPKCH

SEQ ID NO: 7014 - protein, 8 aa, Homo sapiens
CQLPFALR

SEQ ID NO: 7015 - protein, 8 aa, Homo sapiens
CRHGRRTI

SEQ ID NO: 7016 - protein, 8 aa, Homo sapiens
CVAPLLFC

SEQ ID NO: 7017 - protein, 8 aa, Homo sapiens
FFSSSPVS

SEQ ID NO: 7018 - protein, 8 aa, Homo sapiens
FIIVSSHS

SEQ ID NO: 7019 - protein, 8 aa, Homo sapiens
FLSSSPVS

SEQ ID NO: 7020 - skipped

SEQ ID NO: 7021 - protein, 8 aa, Homo sapiens
FQGTNLPF

SEQ ID NO: 7022 - protein, 8 aa, Homo sapiens
FRKTRDLK

SEQ ID NO: 7023 - protein, 8 aa, Homo sapiens
FRLQNPQR

SEQ ID NO: 7024 - protein, 8 aa, Homo sapiens
FSAWKEDL

SEQ ID NO: 7025 - protein, 8 aa, Homo sapiens
FVFSCLLI

SEQ ID NO: 7026 - protein, 8 aa, Homo sapiens
FWSSCKRP

SEQ ID NO: 7027 - protein, 8 aa, Homo sapiens
GKSCSAFA

SEQ ID NO: 7028 - skipped

SEQ ID NO: 7029 - protein, 8 aa, Homo sapiens
GNVGGQGL

SEQ ID NO: 7030 - protein, 8 aa, Homo sapiens
HLGFCETS

SEQ ID NO: 7031 - protein, 8 aa, Homo sapiens
HMPGTYSS

SEQ ID NO: 7032 - protein, 8 aa, Homo sapiens
IASGLTGV

SEQ ID NO: 7033 - protein, 8 aa, Homo sapiens
IQLKVMKT

SEQ ID NO: 7034 - skipped

SEQ ID NO: 7035 - protein, 8 aa, Homo sapiens
LADLSLTK

SEQ ID NO: 7036 - protein, 8 aa, Homo sapiens
LCHRLRCL

SEQ ID NO: 7037 - protein, 8 aa, Homo sapiens
LCNSVCSQ

SEQ ID NO: 7038 - protein, 8 aa, Homo sapiens
LLFTWQVF

SEQ ID NO: 7039 - protein, 8 aa, Homo sapiens
LPTRKFPL

SEQ ID NO: 7040 - protein, 8 aa, Homo sapiens
LVFGAHSF

SEQ ID NO: 7041 - protein, 8 aa, Homo sapiens
LVPLSFLP

SEQ ID NO: 7042 - skipped

SEQ ID NO: 7043 - protein, 8 aa, Homo sapiens
MAMFQQKT

SEQ ID NO: 7044 - protein, 8 aa, Homo sapiens
MFHYFLTF

SEQ ID NO: 7045 - protein, 8 aa, Homo sapiens
MMIITGRC

SEQ ID NO: 7046 - protein, 8 aa, Homo sapiens
MWSRDCLY

SEQ ID NO: 7047 - protein, 8 aa, Homo sapiens
PFDGIEYF

SEQ ID NO: 7048 - protein, 8 aa, Homo sapiens
PWGLDLEY

SEQ ID NO: 7049 - protein, 8 aa, Homo sapiens
QSPSITTF

SEQ ID NO: 7050 - protein, 8 aa, Homo sapiens
RESLSAVE

SEQ ID NO: 7051 - protein, 8 aa, Homo sapiens
RLHFLHYL

SEQ ID NO: 7052 - protein, 8 aa, Homo sapiens
RQETSTPA

SEQ ID NO: 7053 - protein, 8 aa, Homo sapiens
RSLLLTCC

SEQ ID NO: 7054 - protein, 8 aa, Homo sapiens
RVHYGLYY

SEQ ID NO: 7055 - protein, 8 aa, Homo sapiens
SCYLPSYL

SEQ ID NO: 7056 - protein, 8 aa, Homo sapiens
SEIVSFRW

SEQ ID NO: 7057 - protein, 8 aa, Homo sapiens
SNRMKWKY

SEQ ID NO: 7058 - protein, 8 aa, Homo sapiens
SPSALGHL

SEQ ID NO: 7059 - skipped

SEQ ID NO: 7060 - protein, 8 aa, Homo sapiens
SRKSILEI

SEQ ID NO: 7061 - protein, 8 aa, Homo sapiens
SSLHLTKK

SEQ ID NO: 7062 - protein, 8 aa, Homo sapiens
STKAQNPF

SEQ ID NO: 7063 - protein, 8 aa, Homo sapiens
VSKRRCYP

SEQ ID NO: 7064 - protein, 8 aa, Homo sapiens
YARDMQKL

SEQ ID NO: 7065 - protein, 8 aa, Homo sapiens
YWECSAAC

SEQ ID NO: 7066 - skipped

SEQ ID NO: 7067 - protein, 75 aa, Homo sapiens
SQHECRSPTGHCLPESPSPEPRLPGCCGPCTVPGRSTAQRGQARGGPPGSAVAHQGISDTRAPCSTAGPPGDFGC

SEQ ID NO: 7068 - protein, 67 aa, Homo sapiens
CRASLRTDCLLAVVIQFQISTYQAQLRISLRKQLLLFLVAKKTKQDILTHIIECLKKMKTSTSLGMI

SEQ ID NO: 7069 - skipped

SEQ ID NO: 7070 - protein, 63 aa, Homo sapiens
FRDPRDGIPGPQRPLPLRGIQGEVWQAQQEERVQRGAVGDREQPYCQGFRLSVLPEKELCGRA

SEQ ID NO: 7071 - protein, 61 aa, Homo sapiens
GPVYYVCMKELTLERNRMNVSSVLKPFLFTVPIEDMRECTLGRNRMNVSSVLKPCLIPVPI

SEQ ID NO: 7072 - skipped

SEQ ID NO: 7073 - protein, 58 aa, Homo sapiens
CNLPSDIVGECTYCLHNMACSKPSSSHVLFPWPSLFPGAMVHQCHHSSALGSLSYPGW

SEQ ID NO: 7074 - protein, 57 aa, Homo sapiens
ILMMMTICHTVLPGGGIPPMTMRATRMAWQEEGEARVQVAIPSQSTLKTNGKRGVTK

SEQ ID NO: 7075 - protein, 55 aa, Homo sapiens
YHCRSLPNKSNKVSDSIWKTWEGSITYFTVLLRFGIFYCTYTLNIQLFQFVSKTK

SEQ ID NO: 7076 - protein, 54 aa, Homo sapiens
FLTSGQWDIFYVVEQQVHKVCHVSLKCLSLVPLIYSHSGKQQAATDSCEATVAS

SEQ ID NO: 7077 - protein, 52 aa, Homo sapiens
FSCGNTDGHLDISYSLLHKHHPDNSENSFYESKEKSLFHLLLPYDSCLHLLQ

SEQ ID NO: 7078 - protein, 51 aa, Homo sapiens
IFWNIKIRLLAWKESTIFQMLIIEKVLKIHKSMIQMKTHSRNITVQKNKNT

SEQ ID NO: 7079 - protein, 47 aa, Homo sapiens
SVFVLFLNATCWQPWPAIATWPSAAHCSTGSSCPLGSVLCWWLLSSQ

SEQ ID NO: 7080 - protein, 47 aa, Homo sapiens
YHCRSLPNKSNKVSDSIWNYKYFNHKHHLHNYYNYCSNSNNNRVVSF

SEQ ID NO: 7081 - protein, 46 aa, Homo sapiens
FLLLHRCSHGNPFHYYGNNMECCIPKLIIQPRSSNSLDRKLLWPMS

SEQ ID NO: 7082 - protein, 45 aa, Homo sapiens
LLAHMYGFSTYGTQKGECVCLQCLSGSSLFILKQPLDLKISKTFM

SEQ ID NO: 7083 - protein, 44 aa, Homo sapiens
CRRLVSTLNFSAHLLMWTPCTVTWPICTLSSSKTHSTSMHMQQS

SEQ ID NO: 7084 - skipped

SEQ ID NO: 7085 - protein, 43 aa, Homo sapiens
WHRSISGKALHTNYHAYNLHEPKCISGAGDAIHAESVHHHFPP

SEQ ID NO: 7086 - protein, 42 aa, Homo sapiens
FIPQTDNEIFTRKCCSVYSSPWHSFHYCTDHSLEFTYEVNWK

SEQ ID NO: 7087 - protein, 41 aa, Homo sapiens
FLIVFETFPHDTKLVLEPLGPNSEHSHRAVLLLSSYRFDPI

SEQ ID NO: 7088 - protein, 39 aa, Homo sapiens
QPPKALQPPRAPQLPNAPQPPSIPQPPRAPQPLKLLQCL

SEQ ID NO: 7089 - protein, 39 aa, Homo sapiens
WRPPTRELGARWDAGLSGRKAPRVALSRPPGPQCPSGCA

SEQ ID NO: 7090 - protein, 38 aa, Homo sapiens
EQKSLSINVQNVSTRLPLECTHSVGYLESLLFTSNAIA

SEQ ID NO: 7091 - protein, 37 aa, Homo sapiens
CGCGHLSTLPSWPCKAFALASALGGAGASFFVLGTIL

SEQ ID NO: 7092 - protein, 37 aa, Homo sapiens
CLRMMMWEKELEVCALFWRRQRQKAIPTLNVIVMSLQ

SEQ ID NO: 7093 - protein, 36 aa, Homo sapiens
CGVPDILHSGLRTNGMDPFHCRLCDHALCSTWECCQ

SEQ ID NO: 7094 - protein, 36 aa, Homo sapiens
FRTIYFNYHHRWKQVNKYCWCSRRAPSSFEFPSAWK

SEQ ID NO: 7095 - protein, 35 aa, Homo sapiens
SSWICCCRASIICSQHGVLYFGSPWMAENINKKCI

SEQ ID NO: 7096 - protein, 34 aa, Homo sapiens
CVGCQFIVPTRGAPLMARVHTEHSRVLLSPSFTC

SEQ ID NO: 7097 - protein, 33 aa, Homo sapiens
LFSFPCWNYWKLFCNLGFYTEEYESQVCEHLLN

SEQ ID NO: 7098 - protein, 32 aa, Homo sapiens
FWSFCVLQFNWSDERCDWSSYSQSELLPRLHG

SEQ ID NO: 7099 - protein, 32 aa, Homo sapiens
PLENTQIPRTSPLWKITMVLTYPNCVVHVLMF

SEQ ID NO: 7100 - protein, 32 aa, Homo sapiens
SSLLNFLRVQYIWRKLQMYFVFYKQSSLPCSL

SEQ ID NO: 7101 - protein, 31 aa, Homo sapiens
FLLFYWDVCVLLRSLADLCFRHVEIWKSGCN

SEQ ID NO: 7102 - protein, 30 aa, Homo sapiens
FGRCNCCDKVCITGWEPIYAVHETDFKGKA

SEQ ID NO: 7103 - protein, 30 aa, Homo sapiens
FPKDKKICTHGQPVHLDIGNHLQCCHVVGR

SEQ ID NO: 7104 - protein, 30 aa, Homo sapiens
GSNSNLGMKCGIQNQMLVIQQEAGFGILHT

SEQ ID NO: 7105 - protein, 30 aa, Homo sapiens
PWTLKKLLKTWLQMIIHLTYQRQLIDSSAT

SEQ ID NO: 7106 - protein, 30 aa, Homo sapiens
QSRIPSKKCSLRKSTKSYKSCTNLRNLAPT

SEQ ID NO: 7107 - protein, 29 aa, Homo sapiens
ESLPAFLRCHLKTEVPCGLWLRSMGEIAS

SEQ ID NO: 7108 - protein, 29 aa, Homo sapiens
FEEKWCSSIPAKQSWRKHDVGNLSGCRIR

SEQ ID NO: 7109 - skipped

SEQ ID NO: 7110 - protein, 29 aa, Homo sapiens
LCFSCLDWIASLLKLKDRSHPWLIFTHPS

SEQ ID NO: 7111 - protein, 29 aa, Homo sapiens
SKTQRRYKLSSLKEDLLQRSAFTSQAPLY

SEQ ID NO: 7112 - skipped

SEQ ID NO: 7113 - protein, 27 aa, Homo sapiens
LWESLYPEVTPHRTSENTHRRETLCLQ

SEQ ID NO: 7114 - protein, 27 aa, Homo sapiens
SPLWDCSTTTGTHHGCLWEIPSVTLLA

SEQ ID NO: 7115 - skipped

SEQ ID NO: 7116 - protein, 26 aa, Homo sapiens
FPPARSLFTTEPIFQSSRGLMDGGSY

SEQ ID NO: 7117 - protein, 26 aa, Homo sapiens
LYPPTRPTENKFPTRHKYPKKQTIGK

SEQ ID NO: 7118 - protein, 26 aa, Homo sapiens
SVVATPKTMSLMAVNHRALFFVAVNH

SEQ ID NO: 7119 - protein, 26 aa, Homo sapiens
YMWSFCFSPLWLMTAMWLSASHFTTL

SEQ ID NO: 7120 - protein, 25 aa, Homo sapiens
TKLMVWLQYGQAGKIRFTVLLFPPC

SEQ ID NO: 7121 - protein, 24 aa, Homo sapiens
CPAWIPTTRLTFVSKLWRYLFMRS

SEQ ID NO: 7122 - protein, 24 aa, Homo sapiens
FSQESLQRNVHSGRVQNLTRAVPI

SEQ ID NO: 7123 - protein, 24 aa, Homo sapiens
SPVASRGWVKTLRAPTSTITGCPS

SEQ ID NO: 7124 - protein, 24 aa, Homo sapiens
YWSHWQCFDRQHNPLHPQDGDSRV

SEQ ID NO: 7125 - protein, 23 aa, Homo sapiens
FVAVDIFQHCLLGLAKPSLWLRL

SEQ ID NO: 7126 - protein, 23 aa, Homo sapiens
SLKRMRESPQSLPNSLTSLRSWR

SEQ ID NO: 7127 - protein, 23 aa, Homo sapiens
TLSCLGIFPDGHIYFDFYDLLFC

SEQ ID NO: 7128 - skipped

SEQ ID NO: 7129 - protein, 22 aa, Homo sapiens
MNSVNLSSPKARDWTVSELLKN

SEQ ID NO: 7130 - protein, 22 aa, Homo sapiens
SALLLGCLCFIALIGRLMFQAC

SEQ ID NO: 7131 - protein, 22 aa, Homo sapiens
VTEGNCSNYPAIILFSRSLSSS

SEQ ID NO: 7132 - protein, 22 aa, Homo sapiens
WNGKHWITHGRGCGPIPDHLPS

SEQ ID NO: 7133 - protein, 21 aa, Homo sapiens
CGEVLDRLGVGFMWDERKSLL

SEQ ID NO: 7134 - skipped

SEQ ID NO: 7135 - protein, 21 aa, Homo sapiens
LELILETSAQKLLCWLCKKMD

SEQ ID NO: 7136 - protein, 21 aa, Homo sapiens
LHYLMRWPINLIRRWTSFWEI

SEQ ID NO: 7137 - protein, 21 aa, Homo sapiens
QLDLLLPSEYYMFPAWGSVFW

SEQ ID NO: 7138 - protein, 21 aa, Homo sapiens
SCRKIQINHKKKEKFHYHCMC

SEQ ID NO: 7139 - protein, 21 aa, Homo sapiens
TLNSLRWPLQLSNLAGSQISW

SEQ ID NO: 7140 - protein, 20 aa, Homo sapiens
FGFWLVVVSEGAQKGRVLEI

SEQ ID NO: 7141 - protein, 20 aa, Homo sapiens
FGIECGEDREDWNSTSVAAI

SEQ ID NO: 7142 - protein, 20 aa, Homo sapiens
FLCQSNGSVDCNRKLSGIWT

SEQ ID NO: 7143 - protein, 20 aa, Homo sapiens
SRRNRRYRKIYGELKMSLQA

SEQ ID NO: 7144 - protein, 20 aa, Homo sapiens
WSSRHTSLRITHKRHGSIPL

SEQ ID NO: 7145 - protein, 20 aa, Homo sapiens
YSNICANPSPLADLFTLALT

SEQ ID NO: 7146 - protein, 19 aa, Homo sapiens
APLNQRKSSTYKLPRLQSP

SEQ ID NO: 7147 - protein, 18 aa, Homo sapiens
ATRMPEPHRALPTRVPFP

SEQ ID NO: 7148 - protein, 18 aa, Homo sapiens
FLPSSNAHRSKEGSCHSR

SEQ ID NO: 7149 - protein, 18 aa, Homo sapiens
TLILSTSQELCVIYVKEV

SEQ ID NO: 7150 - protein, 17 aa, Homo sapiens
EIFGATESTFLFLEIYM

SEQ ID NO: 7151 - protein, 17 aa, Homo sapiens
FHCIWMPGQFAPDHDGL

SEQ ID NO: 7152 - protein, 17 aa, Homo sapiens
FHLLGGDRILPSGCHVL

SEQ ID NO: 7153 - protein, 17 aa, Homo sapiens
FLDSFVHHDWVLLGHYS

SEQ ID NO: 7154 - protein, 17 aa, Homo sapiens
FNSFGINRIFSSGCHVL

SEQ ID NO: 7155 - protein, 17 aa, Homo sapiens
PYKWPMGYFLCCGTTST

SEQ ID NO: 7156 - protein, 17 aa, Homo sapiens
SRNSTLLIEENLHHSKN

SEQ ID NO: 7157 - protein, 16 aa, Homo sapiens
AMTDDQRMVKNKQLLM

SEQ ID NO: 7158 - protein, 16 aa, Homo sapiens
EWQALDYSRSWLWTDT

SEQ ID NO: 7159 - protein, 16 aa, Homo sapiens
FGGRLPGSWERAGTPD

SEQ ID NO: 7160 - protein, 16 aa, Homo sapiens
FHPDLWNQSWHYNKSK

SEQ ID NO: 7161 - skipped

SEQ ID NO: 7162 - protein, 16 aa, Homo sapiens
SRSHLDFSPYWMKKVK

SEQ ID NO: 7163 - protein, 16 aa, Homo sapiens
WCTAVVAPTYFLHFTH

SEQ ID NO: 7164 - protein, 15 aa, Homo sapiens
FHAFNFGSRFSVCFD

SEQ ID NO: 7165 - protein, 15 aa, Homo sapiens
MNSVNLSSPKASLLR

SEQ ID NO: 7166 - protein, 15 aa, Homo sapiens
YWYFSRCRTSFFCSH

SEQ ID NO: 7167 - protein, 14 aa, Homo sapiens
FATWSALVRLFPVE

SEQ ID NO: 7168 - protein, 14 aa, Homo sapiens
FEFCDIQLSMGSSR

SEQ ID NO: 7169 - protein, 14 aa, Homo sapiens
FPGEIADTERSMEN

SEQ ID NO: 7170 - protein, 14 aa, Homo sapiens
FPLFLCQRCDSSIC

SEQ ID NO: 7171 - protein, 14 aa, Homo sapiens
FQFSCCQSKLHSTG

SEQ ID NO: 7172 - protein, 13 aa, Homo sapiens
CICGASVSHHYGS

SEQ ID NO: 7173 - protein, 13 aa, Homo sapiens
FQFAEWENFNTSR

SEQ ID NO: 7174 - protein, 13 aa, Homo sapiens
SQEILVIALLLKR

SEQ ID NO: 7175 - protein, 13 aa, Homo sapiens
TLSCLGIFPDGHI

SEQ ID NO: 7176 - protein, 13 aa, Homo sapiens
WKFSGQQNPLFYF

SEQ ID NO: 7177 - protein, 13 aa, Homo sapiens
YALLKASWKRKQS

SEQ ID NO: 7178 - skipped

SEQ ID NO: 7179 - protein, 13 aa, Homo sapiens
YSASGHGVRITKS

SEQ ID NO: 7180 - protein, 12 aa, Homo sapiens
CHLVSTCQTIPS

SEQ ID NO: 7181 - protein, 12 aa, Homo sapiens
CQTQARVDGYNR

SEQ ID NO: 7182 - protein, 12 aa, Homo sapiens
FPEAIWISHLIG

SEQ ID NO: 7183 - protein, 12 aa, Homo sapiens
FPILYFFYFDDL

SEQ ID NO: 7184 - protein, 12 aa, Homo sapiens
SLSAWVCLSASS

SEQ ID NO: 7185 - protein, 12 aa, Homo sapiens
YYIRAAKEASNL

SEQ ID NO: 7186 - protein, 11 aa, Homo sapiens
FAGLHSGQTVF

SEQ ID NO: 7187 - protein, 11 aa, Homo sapiens
FIQVRSCRKRS

SEQ ID NO: 7188 - protein, 11 aa, Homo sapiens
FRRRYWLLPCF

SEQ ID NO: 7189 - protein, 11 aa, Homo sapiens
FVGTRTSTSEK

SEQ ID NO: 7190 - protein, 11 aa, Homo sapiens
ILKQVARMCLI

SEQ ID NO: 7191 - protein, 11 aa, Homo sapiens
LHSSIYKMSFS

SEQ ID NO: 7192 - protein, 11 aa, Homo sapiens
SLHLDAWTICS

SEQ ID NO: 7193 - protein, 11 aa, Homo sapiens
VVCLSRRMKRC

SEQ ID NO: 7194 - protein, 11 aa, Homo sapiens
WNHCLPFSGVI

SEQ ID NO: 7195 - protein, 11 aa, Homo sapiens
WWDSMTSFLSW

SEQ ID NO: 7196 - protein, 10 aa, Homo sapiens
FALPGYLPQG

SEQ ID NO: 7197 - protein, 10 aa, Homo sapiens
FHDVCGRENI

SEQ ID NO: 7198 - protein, 10 aa, Homo sapiens
FNFLKEEQSL

SEQ ID NO: 7199 - protein, 10 aa, Homo sapiens
FTAQPCESTH

SEQ ID NO: 7200 - protein, 10 aa, Homo sapiens
IEQNLIGKKN

SEQ ID NO: 7201 - protein, 10 aa, Homo sapiens
LAPCNFYLFT

SEQ ID NO: 7202 - protein, 10 aa, Homo sapiens
NHQKGKFMNF

SEQ ID NO: 7203 - protein, 10 aa, Homo sapiens
QQFTLRSFSI

SEQ ID NO: 7204 - protein, 10 aa, Homo sapiens
SVLRTSLKSF

SEQ ID NO: 7205 - protein, 10 aa, Homo sapiens
TTLSFVLIEE

SEQ ID NO: 7206 - protein, 9 aa, Homo sapiens
CRNMKQQIY

SEQ ID NO: 7207 - protein, 9 aa, Homo sapiens
FALCSRKNL

SEQ ID NO: 7208 - protein, 9 aa, Homo sapiens
FLRSHPGAG

SEQ ID NO: 7209 - protein, 9 aa, Homo sapiens
FPRLKEDTS

SEQ ID NO: 7210 - protein, 9 aa, Homo sapiens
FQKCIYINS

SEQ ID NO: 7211 - protein, 9 aa, Homo sapiens
RMRKWRDQI

SEQ ID NO: 7212 - protein, 9 aa, Homo sapiens
YYASLAWTG

SEQ ID NO: 7213 - protein, 8 aa, Homo sapiens
FAEGLSQL

SEQ ID NO: 7214 - protein, 8 aa, Homo sapiens
FLCRHGSV

SEQ ID NO: 7215 - protein, 8 aa, Homo sapiens
FRRVREVP

SEQ ID NO: 7216 - protein, 8 aa, Homo sapiens
FSHQHGRN

SEQ ID NO: 7217 - protein, 8 aa, Homo sapiens
FTVPVGTA

SEQ ID NO: 7218 - skipped

SEQ ID NO: 7219 - protein, 8 aa, Homo sapiens
KLQEANGI

SEQ ID NO: 7220 - protein, 8 aa, Homo sapiens
LAQFITYA

SEQ ID NO: 7221 - protein, 8 aa, Homo sapiens
LEFLCSPV

SEQ ID NO: 7222 - skipped

SEQ ID NO: 7223 - protein, 8 aa, Homo sapiens
LVSLAMFR

SEQ ID NO: 7224 - protein, 8 aa, Homo sapiens
RILACCGI

SEQ ID NO: 7225 - protein, 8 aa, Homo sapiens
SFIPLSEM

SEQ ID NO: 7226 - protein, 8 aa, Homo sapiens
SLSKQWQC

SEQ ID NO: 7227 - protein, 8 aa, Homo sapiens
SYTIFLLF

SEQ ID NO: 7228 - protein, 8 aa, Homo sapiens
TGLTRMMR

SEQ ID NO: 7229 - protein, 8 aa, Homo sapiens
WWSVYQEG

SEQ ID NO: 7230 - protein, 94 aa, Homo sapiens
FRSPSWSLPFPGSSCLSPSPGLCLGVQSSGQDSRERVWLQPAPLLPAAQDAGWGTGARVVPPTDQSAAPRWGALQRCSEACTSLATGTCRGDTR

SEQ ID NO: 7231 - protein, 62 aa, Homo sapiens
FVYVCDAVAGCAAGPHQHRPHHHHGADDRSYARADSPSLCGSRHLLCCPVNGAVPVYGQTGI

SEQ ID NO: 7232 - protein, 56 aa, Homo sapiens
FCRSPSRHCYGIQDIKNHLVLSNSQWQTARINRWLISCCCIPIHCGGIQFFPKILQ

SEQ ID NO: 7233 - protein, 37 aa, Homo sapiens
LSAIRKMTYFTSWILDSDSTHYIPSCNRKSCYKRMWS

SEQ ID NO: 7234 - protein, 33 aa, Homo sapiens
LPILMMPSKKLILYLFLCCPTLSFWQREQPSRT

SEQ ID NO: 7235 - protein, 32 aa, Homo sapiens
CYLAGSKMTSLTSGWNGKRQSCSQLCLLPCTI

SEQ ID NO: 7236 - protein, 25 aa, Homo sapiens
CLRVRCGGWLCGWTSSASPSSPPRG

SEQ ID NO: 7237 - protein, 24 aa, Homo sapiens
FADAEESIGSLCDICSCQECPCCP

SEQ ID NO: 7238 - protein, 24 aa, Homo sapiens
FNSNNGFICSRKLCQWLHSTGKFH

SEQ ID NO: 7239 - protein, 24 aa, Homo sapiens
FPSTLDFGVLYFNFMLYLGDVSTE

SEQ ID NO: 7240 - protein, 24 aa, Homo sapiens
YMKKNLTPSFAMKYLPPICTLGDQ

SEQ ID NO: 7241 - protein, 21 aa, Homo sapiens
FYHLWLSINRHREKVNQAFGA

SEQ ID NO: 7242 - protein, 19 aa, Homo sapiens
SIPHVPKVTAAHSVTVKLQ

SEQ ID NO: 7243 - protein, 18 aa, Homo sapiens
FCNVRQSERWNSLLPKQK

SEQ ID NO: 7244 - protein, 18 aa, Homo sapiens
FICCINWSKGAFCCIWFL

SEQ ID NO: 7245 - protein, 17 aa, Homo sapiens
FSIWVTSTCFSTDMGTS

SEQ ID NO: 7246 - protein, 17 aa, Homo sapiens
LPILMMPSKKLILYLFL

SEQ ID NO: 7247 - protein, 16 aa, Homo sapiens
FNPNWSFQCWPGCPMY

SEQ ID NO: 7248 - protein, 16 aa, Homo sapiens
FSAPPPGPSHFLAPPV

SEQ ID NO: 7249 - protein, 14 aa, Homo sapiens
FCTIGRKMEKQSDL

SEQ ID NO: 7250 - protein, 14 aa, Homo sapiens
LPLTFSTLLWDSRH

SEQ ID NO: 7251 - protein, 14 aa, Homo sapiens
LSSLALYQSPQRKG

SEQ ID NO: 7252 - protein, 13 aa, Homo sapiens
FSNHDRWKHNICV

SEQ ID NO: 7253 - skipped

SEQ ID NO: 7254 - protein, 12 aa, Homo sapiens
FVPLAERWKNSL

SEQ ID NO: 7255 - protein, 11 aa, Homo sapiens
CRCRREYRVTM

SEQ ID NO: 7256 - protein, 11 aa, Homo sapiens
CTIGRKMEKQS

SEQ ID NO: 7257 - protein, 11 aa, Homo sapiens
FNLVFSPILSL

SEQ ID NO: 7258 - protein, 11 aa, Homo sapiens
LYHWPKDGKTV

SEQ ID NO: 7259 - protein, 9 aa, Homo sapiens
FCWILSCKT

SEQ ID NO: 7260 - protein, 9 aa, Homo sapiens
FNLGYLNLF

SEQ ID NO: 7261 - protein, 8 aa, Homo sapiens
FLFHMYQR

SEQ ID NO: 7262 - protein, 8 aa, Homo sapiens
FTIGITWI

SEQ ID NO: 7263 - protein, 8 aa, Homo sapiens
FVIWLGAR

SEQ ID NO: 7264 - protein, 8 aa, Homo sapiens
LILWSSRQ

SEQ ID NO: 7265 - protein, 59 aa, Mus musculus
TLCMEVMLRWNTRELGYLYLQLCFLNTHFLHTSQEEKLLTLGRFLTWTSRCGSFVIRPL

SEQ ID NO: 7266 - protein, 33 aa, Mus musculus
ICMSPPLLWATLQAPETTSAACKASYRPEGLYL

SEQ ID NO: 7267 - protein, 24 aa, Mus musculus
YFSCDKRCIKHYAGNKSLLTFSGY

SEQ ID NO: 7268 - DNA, 39 bp, Canis lupus familiaris
  CDS (1)..(39)
aaagaaaaaaaaaaagatggggaaaaggaagagcctaaa

SEQ ID NO: 7269 - protein, 13 aa, Canis lupus familiaris
KEKKKDGEKEEPK

SEQ ID NO: 7270 - DNA, 39 bp, Artificial Sequence
  Description of Artificial Sequence: Synthetic oligonucleotide
  CDS (1)..(36)
aaagaaaaaaaaaaaagatggggaaaaggaagagcctaa

SEQ ID NO: 7271 - protein, 12 aa, Artificial Sequence
  Description of Artificial Sequence: Synthetic peptide
KEKKKRWGKGRA

SEQ ID NO: 7272 - DNA, 39 bp, Artificial Sequence
  Description of Artificial Sequence: Synthetic oligonucleotide
  CDS (1)..(39)
aaagaaaaaaaaaagatggggaaaaggaagagcctaaaa

SEQ ID NO: 7273 - protein, 13 aa, Artificial Sequence
  Description of Artificial Sequence: Synthetic peptide
KEKKKMGKRKSLK

SEQ ID NO: 7274 - protein, 36 aa, Canis lupus familiaris
KRAGNFVTVEIQSLVPKKSLPILFGSLRKQYMYSKM
